(19) United States
(12) Patent Application Publication
(10) Pub. No.: US 2006/0134751 A1
(43) Pub. Date: Jun. 22, 2006

(54) Identification of novel MS4A gene family members expressed by hematopoietic cells

(76) Inventors: Thomas F. Tedder, Durham, NC (US); Ying Hua Liang, Durharm, NC (US)

Correspondence Address: FISH & NEAVE IP GROUP;ROPES & GRAY LLP, ONE INTERNATIONAL PLACE, BOSTON, MA, 02110-2624, US

(21) Appl. No.: 11/347,766

(22) Filed: Feb. 2, 2006

Related U.S. Application Data
(63) Continuation of application No. 10/433,287, filed on Sep. 30, 2003, now abandoned.
(60) Provisional application No. 60/254,362, filed on Dec. 8, 2000.
(60) Provisional application No. 60/270,057, filed on Feb. 20, 2001.

(51) Int. Cl. C07K 14/705; C07K 16/28; C07H 21/04; C12P 21/06

(52) U.S. Cl. 435/69.1; 536/23.5; 530/350; 530/388.22; 435/320.1; 435/325

(57) ABSTRACT

Isolated nucleic acids encoding MS4A polypeptides, isolated MS4A polypeptides, and uses thereof. The disclosed MS4A nucleic acids and polypeptides can be used to generate a mouse model of atopic disorders, for drug discovery screens, and for therapeutic treatment of atopic disorders or other MS4A-related conditions.

### CROSS REFERENCE TO RELATED APPLICATIONS

[0001] This application is based on and claims priority to U.S. Provisional Application Ser. No. 60/254,362, filed Dec. 8, 2000, and U.S. Provisional Application Ser. No. 60/270,057 filed Feb. 20, 2001, herein incorporated by reference in their entirety.

### GRANT STATEMENT

[0002] This work was supported by NIH grants CA-81776 and CA-54464. Thus, the U.S. Government has rights in the invention.

### FIELD OF THE INVENTION

[0003] The present invention generally relates to a new class of MS4A proteins characterized by a membrane-embedded structure. More particularly, the present invention provides MS4A nucleic acid and polypeptide sequences, chimeric genes comprising disclosed MS4A sequences, antibodies that specifically recognize MS4A polypeptides, and uses thereof.

Table of Abbreviations

| | |
|---|---|
| ATCC | American Tissue Culture Collection |
| CD20 | CD20 B lymphocyte differentiation antigen |
| FcεRlβ | high-affinity IgE receptor β chain |
| GFP | green fluorescent protein |
| htgs | GenBank human genomic database |
| HTm4 | hematopoietic CD20-like antigen |
| MS4A family | membrane spanning 4-domain family, |
| | subfamily A |

### BACKGROUND ART

[0004] CD20, FcεRIβ, and HTm4 are three cell surface proteins expressed by hematopoietic cells that represent members of a nascent gene family (Adra et al. (1999) Clin Genet 55:431437, Kinet (1999) Annu Rev Immunol 17:931-972; Tedder and Engel (1994) Immunol Today 15:450-454). The deduced amino acid sequence of human and mouse CD20 first demonstrated a cell surface protein containing four membrane-spanning regions, N- and C-terminal cytoplasmic domains, and an ˜50 amino acid loop that serves as the extracellular domain (Einfeld et al. (1988) EMBO J 7:711-717; Stamenkovic and Seed (1988) J Exp Med 167:1975-1980; Tedder et al. (1988a) J Immunol 141:4388-4394; Tedder et al. (1988b) Proc Natl Acad Sci USA 85:208-212). Human CD20 shares 20% amino acid sequence identity with FcεRIβ and HTm4 (Adra et al. (1994) Proc Natl Acad Sci USA 91:10178-10182, Küster et al. (1992) J Biol Chem 267:12782-12787). Moreover, these three proteins have a similar overall structure in man, mouse, and rat with significant sequence identity within the first three membrane-spanning domains (Kinet et al. (1988) Proc Natl Acad Sci USA 85:6483-6487; Ra et al. (1989) Nature 19:1771-7; Tedder et al., 1988a). In addition, all three genes are located in the same region of human chromosome 11q12-13.1 (Adra et al., 1994; Hupp et al. (1989) J Immunol 143:3787-3791; Tedder et al. (1989a) J Immunol 142:2555-2559) and mouse chromosome 19 (Hupp et al. 1989; Tedder et al., 1988a). These three genes are therefore likely to have evolved from a common precursor.

[0005] Despite structural and sequence conservation between CD20, FCεRIβ and HTm4, transcription of each gene is differentially regulated. CD20 is only expressed by B lymphocytes (Stashenko et al. (1980) J Immunol 125:1678-1685; Tedder et al., 1988a). FcεRIβ is expressed by mast cells and basophils (Kinet, 1999). HTm4 is expressed by diverse lymphoid and myeloid origin hematopoietic cells (Adra et al., 1994). Although the function of HTm4 remains unexplored, CD20 and FcεRIβ have critical roles in cell signaling. CD20 forms a homo- or hetero-tetrameric complex that is functionally important for regulating cell cycle progression and signal transduction in B lymphocytes (Tedder and Engel, 1994). CD20 additionally regulates transmembrane Ca⁺⁺ conductance, possibly as a functional component of a Ca⁺⁺-permeable cation channel (Bubien et al. J Cell Biol 121:1121-1132; Kanzaki et al. (1997a) J Biol Chem 272:14733-14739; Kanzaki et al. (1997b) J Biol Chem 272:4964-4969; Kanzaki et al. (1995) J Biol Chem 270:13099-13104). FcεRIRβ is part of a tetrameric receptor complex consisting of α, β, and two γ chains (Blank et al. (1989) Nature 337:187-189). FcεRIβ mediates interactions with IgE-bound antigens that lead to cellular responses such as the degranulation of mast cells. Specifically, the FcεRIβ subunit functions as an amplifier of FcεRIβ-mediated activation signals (Dombrowicz et al. (1998) Immunity 8:517-529; Lin et al. (1996) Cell 85:985-995). Because of their unique structure and sequence homology, CD20, FcεRIβ, and HTm4 are likely to share overlapping functional properties.

[0006] CD20 and FcεRIβ are also important clinically. Antibodies against CD20 are effective in treating non-Hodgkin's lymphoma (McLaughlin et al. (1998) Oncology 12:1763-1769; Onrust et al. (1989) J Biol Chem 264:15323-15327; Weiner (1999) Semin Oncol 26:43-51). Genetic variations at chromosome 11q12-13 can also play a role in the pathogenesis of allergic diseases (Adra et al., 1999; Kinet, 1999). Recent studies suggest that FcεRIβ contributes to such diseases, and other genetic elements in this region likely also contribute to allergic disease.

[0007] Since CD20, FcεRIβ, and HTm4 are likely to have evolved by duplication of an ancestral gene, other related proteins might exist that form additional receptor complexes. In view of the clinical importance noted above, the identification of such proteins thus represents a long-felt and ongoing need in the art. To address this need, applicants have identified novel human and mouse proteins that span the cell membrane at least four times and share high levels of amino acid sequence identity with CD20, FcεRIβ, and HTm4. This finding reveals a new gene family that has been designated herein as the MS4A family (membrane spanning 4-domain family, subfamily A). Currently this family contains at least 10 subgroups (MS4A1 through MS4A12) that encode at least 21 previously unidentified human and mouse proteins expressed by hematopoietic cells and by diverse cell types in non-hematopoietic tissues.

### SUMMARY OF THE INVENTION

[0008] The present invention discloses isolated MS4A polypeptides and isolated nucleic acid molecules encoding the same. Preferably, an isolated MS4A polypeptide, or functional portion thereof, comprises a polypeptide encoded by the nucleic acid molecule of any one of the odd numbered SEQ ID NOs:1-37 a polypeptide encoded by a nucleic acid molecule that is substantially identical to any one of the odd-numbered SEQ ID NOs:1-37, a polypeptide fragment encoded by a 20 nucleotide sequence that is identical to a contiguous 20 nucleotide sequence of any one of the odd-numbered SEQ ID NOs:1-37, a polypeptide having an amino acid sequence of any one of the even-numbered SEQ ID NOs:2-38, a polypeptide that is a biological equivalent of any one of the even-numbered SEQ ID NOs:2-38, or a polypeptide that is immunologically cross-reactive with an antibody that shows specific binding with a polypeptide comprising some or all amino acids of any one of the even-numbered SEQ ID NOs:2-38.

[0009] The present invention further teaches chimeric genes having a heterologous promoter that drives expression of a nucleic acid sequence encoding a MS4A polypeptide. Preferably, the chimeric gene is carried in a vector and introduced into a host cell so that a MS4A polypeptide of the present invention is produced. Preferred host cells include but are not limited to a bacterial cell, a hamster cell, a mouse cell, or a human cell.

[0010] In another aspect of the invention, a method is provided for detecting a nucleic acid molecule that encodes a MS4A polypeptide. According to the method, a biological sample having nucleic acid material is hybridized under stringent hybridization conditions to a MS4A nucleic acid molecule of the present invention. Such hybridization enables a nucleic acid molecule of the biological sample and the MS4A nucleic acid molecule to form a detectable duplex structure. Preferably, the MS4A nucleic acid molecule includes some or all nucleotides of any one of the odd-numbered SEQ ID NOs:1-37. Also preferably, the biological sample comprises human nucleic acid material.

[0011] The present invention further teaches an antibody that specifically recognizes a MS4A polypeptide. Preferably, the antibody recognizes some or all amino acids of any one of the even-numbered SEQ ID NOs:2-38. A method for producing a MS4A antibody is also disclosed, and the method comprises recombinantly or synthetically producing a MS4A polypeptide, or portion thereof; formulating the MS4A polypeptide so that it is an effective immunogen; immunizing an animal with the formulated polypeptide to generate an immune response that includes production of MS4A antibodies; and collecting blood serum from the immunized animal containing antibodies that specifically recognize a MS4A polypeptide. Antibody-producing cells can be optionally fused with an immortal cell line whereby a monoclonal antibody that specifically recognizes a MS4A polypeptide can be selected. Preferably, the MS4A polypeptide used as an immunogen includes some or all amino acid sequences of any one the even-numbered SEQ ID NOs:2-38.

[0012] A method is also provided for detecting a level of MS4A polypeptide using an antibody that specifically recognizes a MS4A polypeptide. According to the method, a biological sample is obtained from an experimental subject and a control subject, and a MS4A polypeptide is detected in the sample by immunochemical reaction with the MS4A antibody. Preferably, the antibody recognizes amino acids of any one of the even-numbered SEQ ID NOs:2-38, and is prepared according to a method of the present invention for producing such an antibody.

[0013] The present invention further discloses a method for identifying a compound that modulates MS4A function. The method comprises: exposing an isolated MS4A polypeptide to one or more compounds, and assaying binding of a compound to the isolated MS4A polypeptide. A compound is selected that demonstrates specific binding to the isolated MS4A polypeptide. Preferably, the MS4A polypeptide used in the binding assay of the method includes some or all amino acids of any one of the even-numbered SEQ ID NOs:2-38.

[0014] Also provided is a method for identifying a regulator of MS4A gene expression. The method comprises (a) exposing a cell sample with a candidate compound to be tested, the cell sample containing at least one cell containing a DNA construct comprising a modulatable transcriptional regulatory sequence of a MS4A-encoding nucleic acid and a reporter gene which is capable of producing a detectable signal; (b) evaluating an amount of signal produced in relation to a control sample; and (c) identifying a candidate compound as a modulator of MS4A gene expression based on the amount of signal produced in relation to a control sample. Preferably, the modulatable transcriptional regulatory sequence of a MS4A-encoding nucleic acid comprises a sequence that is immediately upstream of the initial coding region of a MS4A gene as set forth in any one of SEQ ID NOs:73-81.

[0015] The present invention further provides a method for modulating MS4A function in a subject. According to the method, a pharmaceutical composition is prepared that includes a substance capable of modulating MS4A expression or function, and a carrier. An effective dose of the pharmaceutical composition is administered to a subject, whereby MS4A activity is altered in the subject. Provided are therapeutic methods wherein a change in MS4A activity comprises a shift in the abundance of cell subpopulations expressing said protein, modulation of [Ca²⁺]ᵢ levels, or altered cell function. In a preferred embodiment, the substance used to perform this method shows specific binding to some or all amino acids of any one of the even-numbered SEQ ID NOs:2-38, and was discovered by a method of the present invention. In another embodiment, MS4A function is disrupted by immunizing a subject with an effective dose of the disclosed MS4A polypeptide. The immune system of the subject produces an antibody that specifically recognizes the MS4A polypeptide, and preferably recognizes some or all of amino acids of any one of the even-numbered SEQ ID NOs:2-38. In a further embodiment, a gene therapy vector is used, the vector comprising a nucleotide sequence encoding a MS4A polypeptide. Alternatively, the gene therapy vector comprises a nucleotide sequence encoding a nucleic acid molecule, a peptide, or a protein that interacts with a MS4A nucleic acid or polypeptide. Preferably, the subject is a human subject.

[0016] Accordingly, it is an object of the present invention to provide novel MS4A nucleic acid and polypeptide sequences, and novel methods relating thereto. This object is achieved in whole or in part by the present invention.

[0017] An object of the invention having been stated above, other objects and advantages of the present invention will become apparent to those skilled in the art after a study of the following description of the invention, Figures and non-limiting Examples.

### BRIEF DESCRIPTION OF THE DRAWINGS

[0018] FIG. 1 depicts cDNAs encoded by fifteen new human or mouse MS4A gene products. Consensus sequences from cDNAs and overlapping ESTs are indicated by their GenBank Accession numbers. Representative full-length cDNAs for each gene product are shown, except for MS4a3 which was not full-length. 5′ and 3′ untranslated sequences are shown as horizontal lines with relative nucleotide lengths shown. Coding regions are shown as boxes with translation initiation and termination codons and their relative nucleotide locations shown. Poly(A) attachment signal sequences (AATAAA) are indicated when known. Deduced hydrophobic regions are shown as filled boxes with the predicted membrane-spanning domains shown as TM1-TM4. Additional hydrophobic regions in MS4A4 proteins are shown as shaded boxes. Sites of putative nucleotide polymorphisms in MS4A6A are indicated by two (X)s.

[0019] FIG. 2 depicts exon-intron organization of the human MS4A genes. The maps were constructed by aligning known and predicted MS4A cDNA sequences with human genomic sequences as described in Materials and Methods. Exons are shown as boxes with the predicted translation initiation codons (ATG), transmembrane domains (TM) and termination codons indicated on the top. All exon and intron distances are shown to scale. Gaps indicate where intron distances have not been determined for MS4A3, MS4A4A, and MS4A12. Two long introns present in MS4A4E are not to scale but the intron lengths are indicated. Exon numbering for MS4A1, and MS4A2 is as published (Kuster et al., 1992; Tedder et al., 1988a; Tedder et al., 1988b).

[0020] FIG. 3 shows human MS4A4E protein and transcript sequences predicted from genomic DNA sequences. MS4A4E sequences are compared with human MS4A4A cDNA (disclosed herein) and genomic sequences. Gaps were introduced to provide optimal alignment. The boxed MC sequence near the 5′ end of the MS4A4A sequence indicates the length of the most 5′ MS4A4A cDNA sequence. Sequences upstream of this are based on contiguous genomic DNA sequences. Nucleotide numbering is based on the MS4A4A cDNA sequence, disclosed herein. Predicted translation initiation codons are shaded. Predicted membrane-spanning regions are underlined. An asterisk indicates predicted translation termination codons. Potential poly-A attachment signal sequences (AATAAA) are boxed.

[0021] FIG. 4 shows human MS4A6E protein and transcript sequences predicted from genomic DNA and overlapping cDNA sequences. PredictedMS4A6E transcript sequences are compared with human MS4A6A cDNA sequence (disclosed herein). Gaps were introduced in the nucleotide sequence to provide optimal alignment. The 5′ end of both transcripts start at 3′ splice-acceptor sites which demark the first translated exons for both genes. The 5′ end of the putative MS4A6E transcript is based on genomic DNA sequence, while the predicted sequences starting at nucleotide 60 were based on both genomic DNA sequences and overlapping cDNA sequences. A gap in the MS4A6A sequence is indicated where TM1/2 and TM2 exons are not found in MS4A6E transcripts. MS4A6A nucleotide numbering is based on the cDNA sequence (disclosed herein). Predicted translation initiation codons are shaded. Predicted membrane-spanning regions are underlined. An asterisk indicates the predicted translation termination codon for the MS4A6E protein.

[0022] FIG. 5 shows human MS4A10 protein and transcript sequences predicted from human genomic DNA sequences. MS4A10 nucleotide sequence is compared with mouse MS4A10 cDNA sequence (disclosed herein). The 5′ end of both transcripts start at 3′ splice-acceptor sites which demark the first translated exons for both genes. MS4A10 nucleotide numbering is based on the cDNA sequence (disclosed herein). Predicted translation initiation codons are shaded. Predicted membrane-spanning regions are underlined. An asterisk indicates predicted translation termination codon for the MS4A10 protein. Potential poly-A attachment signal sequences (AATAAA) are boxed.

[0023] FIG. 6 depicts a physical linkage map for the MS4A genes. A scheme for chromosome 11 structure is shown on the left with the mapped locations for MS4A1, MS4A2 and MS4A3 indicated. Representative human BAC clones are shown as vertical black bars with clone names shown on the top and clone size shown at the bottom. All distances are shown to the indicated scale. The distance between and spatial relationship of RP11-312N17 to the four other overlapping BACs shown at the bottom are unknown. Thin bars indicate continuous characterized (mapped or sequenced) regions of DNA that contain identified MS4A genes. When the relative position of this region of DNA is known relative to the representative BACs that are shown, the thin bars overlay the BAC. The mapped position of each MS4A gene is indicated on the right with the relative direction of gene translation indicated by arrows (→). In some cases, approximate distances between MS4A genes (termination codons to the translation initiation codon for the next gene) are indicated in base pairs (bp). In some cases, approximate MS4A gene size is indicated showing the distance between predicted translation initiation codons and translation termination codons as show in FIG. 7.

[0024] FIG. 7 depicts deduced amino acid sequences for CD20 (human A1, SEQ ID-NO:40; mouse a1, SEQ ID NO:48), FcεRIβ (human A2, SEQ ID NO:42; mouse a2, SEQ ID NO:50), HTm4 (human A3, SEQ ID NO:44; mouse a3, SEQ ID NO:20), and 19 new MS4A (human) (even-numbered SEQ ID NOs:2-18, 46) and MS4a (mouse and pig) proteins (even-numbered SEQ ID NOs:22-38, 56). Gaps were introduced to optimize alignments. Numbers represent predicted residue positions. The predicted membrane-spanning regions (TM1-TM4) are indicated. Predicted intronlexon splice junctions are indicated by vertical bars where information was available. Amino acids common to 10 or more proteins are shaded. *indicates partial sequence for the MS4a3 protein. CD20, FcεRIβ, and HTm4 sequences and known intronlexon borders (SEQ ID NOs:39-44, 47-50) are as published (Adra et al., 1994; Kuster et al., 1992; Ra et al., 1989; Tedder et al., 1988a; Tedder et al., 1989b; Tedder et al., 1988b). MS4A12 represents a conceptual translation (SEQ ID NO:46) of a human colon mucosa cDNA sequence (GenBank AK000224, SEQ ID NO:45), and MS4a12 represents a conceptual translation (SEQ ID NO:56) of a homologous cDNA sequence from pig (GenBank AJ236932, SEQ ID NO:55).

[0025] FIG. 8 depicts UPGMA (unweighted pair group method using arithmetic averages) tree of deduced MS4A and MS4a protein sequences. Horizontal tree branch length is a measure of sequence relatedness. For example, MS4a4B and MS4a4C are the most similar in sequence, while CD20 (MS4A1) sequences were the most divergent from other family members. The MS4a12p sequence was from pig, while all other MS4a sequences were from mouse. The UPGMA tree was generated using Geneworks version 2.0 (IntelliGenetics, Inc., Mountain View, Calif., USA).

[0026] FIG. 9 shows immunofluorescent detection of CD20 expression during B cell development. Single cell suspensions of leukocytes were isolated from wild-type mice, stained using MB20-13 (visualized using a PE-conjugated, anti-mouse IgG3 antibody) and anti-B220 (FITC-conjugated) monoclonal antibodies, and examined by two-color immunofluorescence staining with flow cytometry analysis. Quadrant gates indicate negative and positive populations of cells as determined using isotype-matched control monoclonal antibodies. The gated cell populations correspond to the cells described in Table 7, and are shown for reference. These results are representative of those obtained with six (6) two month-old wild type mice.

[0027] FIG. 10 summarizes the strategy for targeted disruption of the mouse CD20 gene.

[0028] FIG. 10A shows genomic clones encoding CD20.

[0029] FIG. 10B shows the intron-exon organization of the wild typeCD20 allele containing exons 5-8 (shaded squares).

[0030] FIG. 10C shows the structure of the CD20 targeting vector.

[0031] FIG. 10D shows the predicted structure of the CD20 allele after gene targeting in ES cells by homologous recombination. The EcoR V restriction site in exon 6 is deleted as indicated.

[0032] FIG. 10E presents Southern blot analysis of tail DNA from two wild type and four CD20^{-/-} mice. Genomic DNA was digested with EcoR V, transferred to nitrocellulose and hybridized with the 5′ probe indicated in (D).

[0033] FIG. 10F shows PCR amplification of genomic DNA from wild type and CD20^{-/-} mice using primers that bind in exons 6 and 7. Amplification of glyceraldehyde-3-phosphate dehydrogenase (G3PDH) is shown as a positive control.

[0034] FIG. 10G shows PCR amplification of cDNA generated from splenic RNA of wild type and CD20^{-/-} mice. Each reaction mixture contained a sense primer that hybridized with sequences encoded by exon 3 and antisense primers that hybridized with either exon 6 or Neo^{r} gene promoter sequences.

[0035] FIGS. 10H and 10I show reactivity of the MB20-13 monoclonal antibody with CD20 cDNA-transfected (thick line) or untransfected (dashed line) 300.19 cells (FIG. 10H) or Chinese Hamster Ovary (CHO) cells (FIG. 10I). The thin lines represent CD20 cDNA-transfected cells stained with secondary antibody alone or an isotype-control monoclonal antibody. Indirect immunofluorescence staining was visualized by flow cytometry analysis.

[0036] FIG. 10J shows immunofluorescent staining of splenocytes from CD20^{-/-} or wild type mice with MB20-13 (visualized using a PE-conjugated, anti-mouse IgG3 antibody) and anti-B220 (FITC-conjugated) monoclonal antibodies. Splenocytes from CD20^{-/-} mice generated histograms identical to those obtained without MB20-1 monoclonal antibody present, using the secondary antibody alone.

[0037] FIG. 11 depicts immunofluorescent detection of B lymphocyte subpopulations in CD20^{-/-} and wild type mice. Lymphocytes were isolated and examined by two color immunofluorescent staining with flow cytometry analysis. Quadrants delineated by squares indicate negative and positive populations of cells as determined using unreactive monoclonal antibody controls. The gated cell populations correspond to the cells described in Table 7 that represent at least 6 mice of each genotype.

[0038] FIG. 12 shows altered signal transduction in CD20^{-/-} B cells. FIG. 12 also shows CD19 expression by splenocytes from CD20^{-/-} (thin line) and wild type (thick line) mice. Immunofluorescence staining using PE-conjugated anti-CD19 monoclonal antibody with flow cytometry analysis. The dashed line represents staining of wild type splenocytes with a control antibody.

[0039] FIG. 12A presents calcium responses induced by BCR or CD19 ligation in CD20^{-/-} and wild type B cells. Splenocytes were loaded with 1 μM indo-1-AM ester and B cells were stained with FITC-conjugated anti-B220 antibody. At 1 min (arrow), optimal concentrations of goat anti-IgM F(ab′)₂ antibody fragments, anti-CD19 monoclonal antibody or Thapsigargin were added, with or without EGTA present. Increased ratios of indo-1 fluorescence indicate increased [Ca²⁺]ᵢ. Results represent those from at least four experiments.

[0040] FIG. 12B presents assays of tyrosine phosphorylation of proteins from purified splenic B cells of CD20^{-/-} and wild type mice. B cells (2×10⁷/sample) were incubated with anti-IgM antibody for the times shown and detergent lysed. Proteins were resolved by SDS-PAGE, transferred to nitrocellulose and immunoblotted with anti-phosphotyrosine (anti-PTyr) antibody. The blot was stripped and reprobed with anti-SHP-1 antibody as a control for equivalent protein loading. Western blots from two of three experiments are shown to demonstrate the range of results.

### DETAILED DESCRIPTION OF THE INVENTION

[0041] The present invention provides isolated nucleic acids encoding MS4A polypeptides (representative embodiments set forth as the odd-numbered SEQ ID NOs:1-37), isolated MS4A polypeptides (representative embodiments set forth as the even-numbered SEQ ID NOs:2-38), and uses thereof. The disclosed MS4A nucleic acids and polypeptides can be used according to methods of the present invention for drug discovery screens, for therapeutic treatment of atopic conditions, and for therapeutic regulation of [Ca²⁺]ₗ levels, among other uses.

I. Definitions

[0042] While the following terms are believed to be well understood by one of ordinary skill in the art, the following definitions are set forth to facilitate explanation of the invention. The entire contents of all publications mentioned herein, including the discussion of the background art presented above, are hereby fully incorporated by reference.

[0043] I.A. MS4A Nucleic Acids

[0044] The nucleic acid molecules provided by the present invention include the isolated nucleic acid molecules of any one of the odd-numbered SEQ ID NOs:1-37, sequences substantially similar to sequences of any one of the odd-numbered SEQ ID NOs:1-37, conservative variants thereof, subsequences and elongated sequences thereof, complementary DNA molecules, and corresponding RNA molecules. The present invention also encompasses genes, cDNAs, chimeric genes, and vectors comprising disclosed MS4A nucleic acid sequences.

[0045] The term “nucleic acid molecule” refers to deoxyribonucleotides or ribonucleotides and polymers thereof in either single- or double-stranded form. Unless specifically limited, the term encompasses nucleic acids containing known analogues of natural nucleotides which have similar properties as the reference natural nucleic acid. Unless otherwise indicated, a particular nucleotide sequence also implicitly encompasses conservatively modified variants thereof (e.g. degenerate codon substitutions), complementary sequences, subsequences, elongated sequences, as well as the sequence explicitly indicated. The terms “nucleic acid molecule” or “nucleotide sequence” can also be used in place of “gene”, “cDNA”, or “mRNA”. Nucleic acids can be derived from any source, including any organism.

[0046] The term “isolated”, as used in the context of a nucleic acid molecule, indicates that the nucleic acid molecule exists apart from its native environment and is not a product of nature. An isolated DNA molecule can exist in a purified form or can exist in a non-native environment such as a transgenic host cell.

[0047] The term “purified”, when applied to a nucleic acid, denotes that the nucleic acid is essentially free of other cellular components with which it is associated in the natural state. Preferably, a purified nucleic acid molecule is a homogeneous dry or aqueous solution. The term “purified” denotes that a nucleic acid or protein gives rise to essentially one band in an electrophoretic gel. Particularly, it means that the nucleic acid is at least about 50% pure, more preferably at least about 85% pure, and most preferably at least about 99% pure.

[0048] The term “substantially identical”, the context of two nucleotide or amino acid sequences, can also be defined as two or more sequences or subsequences that have at least 60%, preferably 80%, more preferably 90-95%, and most preferably at least 99% nucleotide or amino acid sequence identity, when compared and aligned for maximum correspondence, as measured using one of the following sequence comparison algorithms (described herein below under the heading Nucleotide and Amino Acid Sequence Comparisons) or by visual inspection. Preferably, the substantial identity exists in nucleotide sequences of at least 50 residues, more preferably in nucleotide sequence of at least about 100 residues, more preferably in nucleotide sequences of at least about 150 residues, and most preferably in nucleotide sequences comprising complete coding sequences. In one aspect, polymorphic sequences can be substantially identical sequences. The term “polymorphic” refers to the occurrence of two or more genetically determined alternative sequences or alleles in a population. An allelic difference can be as small as one base pair.

[0049] Another indication that two nucleotide sequences are substantially identical is that the two molecules specifically or substantially hybridize to each other under stringent conditions. In the context of nucleic acid hybridization, two nucleic acid sequences being compared can be designated a “probe” and a “target”. A “probe” is a reference nucleic acid molecule, and a “target” is a test nucleic acid molecule, often found within a heterogenous population of nucleic acid molecules. A “target sequence” is synonymous with a “test sequence”.

[0050] A preferred nucleotide sequence employed for hybridization studies or assays includes probe sequences that are complementary to or mimic at least an about 14 to 40 nucleotide sequence of a nucleic acid molecule of the present invention. Preferably, probes comprise 14 to 20 nucleotides, or even longer where desired, such as 30, 40, 50, 60, 100, 200, 300, or 500 nucleotides or up to the full length of any of those set forth as the odd-numbered SEQ ID NOs:1-37. Such fragments can be readily prepared by, for example, directly synthesizing the fragment by chemical synthesis, by application of nucleic acid amplification technology, or by introducing selected sequences into recombinant vectors for recombinant production.

[0051] The phrase “hybridizing specifically to” refers to the binding, duplexing, or hybridizing of a molecule only to a particular nucleotide sequence under stringent conditions when that sequence is present in a complex nucleic acid mixture (e.g., total cellular DNA or RNA). The phrase “binds substantially to” refers to complementary hybridization between a probe nucleic acid molecule and a target nucleic acid molecule and embraces minor mismatches that can be accommodated by reducing the stringency of the hybridization media to achieve the desired hybridization.

[0052] “Stringent hybridization conditions” and “stringent hybridization wash conditions” in the context of nucleic acid hybridization experiments such as Southern and Northern blot analysis are both sequence- and environment-dependent. Longer sequences hybridize specifically at higher temperatures. An extensive guide to the hybridization of nucleic acids is found in Tijssen (1993) Laboratory Techniques in Biochemistry and Molecular Biology-Hybridization with Nucleic Acid Probes, part I chapter 2, Elsevier, New York, N.Y. Generally, highly stringent hybridization and wash conditions are selected to be about 5° C. lower than the thermal melting point (Tₘ) for the specific sequence at a defined ionic strength and pH. Typically, under “stringent conditions” a probe will hybridize specifically to its target subsequence, but to no other sequences.

[0053] The Tₘ is the temperature (under defined ionic strength and pH) at which 50% of the target sequence hybridizes to a perfectly matched probe. Very stringent conditions are selected to be equal to the Tₘ for a particular probe. An example of stringent hybridization conditions for Southern or Northern Blot analysis of complementary nucleic acids having more than about 100 complementary residues is overnight hybridization in 50% formamide with 1 mg of heparin at 42° C. An example of highly stringent wash conditions is 15 minutes in 0.15 M NaCl at 65° C. An example of stringent wash conditions is 15 minutes in 0.2×SSC buffer at 65° C. (See. Sambrook et al. eds. (1989) Molecular Cloning: A Laboratory Manual, Cold Spring Harbor Laboratory Press, Cold Spring Harbor, N.Y. for a description of SSC buffer). Often, a high stringency wash is preceded by a low stringency wash to remove background probe signal. An example of medium stringency wash conditions for a duplex of more than about 100 nucleotides, is 15 minutes in 1×SSC at 45° C. An example of low stringency wash for a duplex of more than about 100 nucleotides, is 15 minutes in 4-6× SSC at 40° C. For short probes (e.g., about 10 to 50 nucleotides), stringent conditions typically involve salt concentrations of less than about 1.0 M Na⁺ ion, typically about 0.01 to 1.0 M Na⁺ ion concentration (or other salts) at pH 7.0-8.3, and the temperature is typically at least about 30° C. Stringent conditions can also be achieved with the addition of destabilizing agents such as formamide. In general, a signal to noise ratio of 2-fold (or higher) than that observed for an unrelated probe in the particular hybridization assay indicates detection of a specific hybridization.

[0054] The following are examples of hybridization and wash conditions that can be used to clone homologous nucleotide sequences that are substantially identical to reference nucleotide sequences of the present invention: a probe nucleotide sequence preferably hybridizes to a target nucleotide sequence in 7% sodium dodecyl sulfate (SDS), 0.5 M NaPO₄, 1 mM EDTA at 50° C. followed by washing in 2×SSC, 0.1% SDS at 50° C.; more preferably, a probe and target sequence hybridize in 7% sodium dodecyl sulfate (SDS), 0.5 M NaPO₄, 1 mM EDTA at 50° C. followed by washing in 1× SSC, 0.1% SDS at 50° C.; more preferably, a probe and target sequence hybridize in 7% sodium dodecyl sulfate (SDS), 0.5 M NaPO₄, 1 mM EDTA at 50° C. followed by washing in 0.5× SSC, 0.1% SDS at 50° C.; more preferably, a probe and target sequence hybridize in 7% sodium dodecyl sulfate (SDS), 0.5 M NaPO₄, 1 mM EDTA at 50° C. followed by washing in 0.1×SSC, 0.1% SDS at 50° C.; more preferably, a probe and target sequence hybridize in 7% sodium dodecyl sulfate (SDS), 0.5 M NaPO₄, 1 mM EDTA at 50° C. followed by washing in 0.1×SSC, 0.1% SDS at 65° C.

[0055] A further indication that two nucleic acid sequences are substantially identical is that proteins encoded by the nucleic acids are substantially identical, share an overall three-dimensional structure, are biologically functional equivalents, or are immunologically cross-reactive. These terms are defined further under the heading MS4A Polypeptides herein below. Nucleic acid molecules that do not hybridize to each other under stringent conditions are still substantially identical if the corresponding proteins are substantially identical. This can occur, for example, when two nucleotide sequences are significantly degenerate as permitted by the genetic code.

[0056] The term “conservatively substituted variants” refers to nucleic acid sequences having degenerate codon substitutions wherein the third position of one or more selected (or all) codons is substituted with mixed-base and/or deoxyinosine residues (Batzer et al. (1991) Nucleic Acids Res 19:5081; Ohtsuka et al. (1985) J Biol Chem 260:2605-2608; Rossolini et al. (1994) Mol Cell Probes 8:91-98).

[0057] The term “subsequence” refers to a sequence of nucleic acids that comprises a part of a longer nucleic acid sequence. An exemplary subsequence is a probe, described herein above, or a primer. The term “primer” as used herein refers to a contiguous sequence comprising about 8 or more deoxyribonucleotides or ribonucleotides, preferably 10-20 nucleotides, and more preferably 20-30 nucleotides of a selected nucleic acid molecule. The primers of the invention encompass oligonucleotides of sufficient length and appropriate sequence so as to provide initiation of polymerization on a nucleic acid molecule of the present invention.

[0058] The term “elongated sequence” refers to an addition of nucleotides (or other analogous molecules) incorporated into the nucleic acid. For example, a polymerase (e.g., a DNA polymerase), e.g., a polymerase which adds sequences at the 3′ terminus of the nucleic acid molecule. In addition, the nucleotide sequence can be combined with other DNA sequences, such as promoters, promoter regions, enhancers, polyadenylation signals, intronic sequences, additional restriction enzyme sites, multiple cloning sites, and other coding segments.

[0059] The term “complementary sequence”, as used herein, indicates two nucleotide sequences that comprise antiparallel nucleotide sequences capable of pairing with one another upon formation of hydrogen bonds between base pairs. As used herein, the term “complementary sequences” means nucleotide sequences which are substantially complementary, as can be assessed by the same nucleotide comparison set forth above, or is defined as being capable of hybridizing to the nucleic acid segment in question under relatively stringent conditions such as those described herein. A particular example of a complementary nucleic acid segment is an antisense oligonucleotide.

[0060] The term “gene” refers broadly to any segment of DNA associated with a biological function. A gene encompasses sequences including but not limited to a coding sequence, a promoter region, a cis-regulatory sequence, a non-expressed DNA segment is a specific recognition sequence for regulatory proteins, a non-expressed DNA segment that contributes to gene expression, a DNA segment designed to have desired parameters, or combinations thereof. A gene can be obtained by a variety of methods, including cloning from a biological sample, synthesis based on known or predicted sequence information, and recombinant derivation of an existing sequence.

[0061] The term “gene expression” generally refers to the cellular processes by which a biologically active polypeptide is produced from a DNA sequence.

[0062] The present invention also encompasses chimeric genes comprising the disclosed MS4A sequences. The term “chimeric gene”, as used herein, refers to a promoter region operably linked to a MS4A coding sequence, a nucleotide sequence producing an antisense RNA molecule, a RNA molecule having tertiary structure, such as a hairpin structure, or a double-stranded RNA molecule.

[0063] The term “operably linked”, as used herein, refers to a promoter region that is connected to a nucleotide sequence in such a way that the transcription of that nucleotide sequence is controlled and regulated by that promoter region. Techniques for operatively linking a promoter region to a nucleotide sequence are well known in the art.

[0064] The terms “heterologous gene”, “heterologous DNA sequence”, “heterologous nucleotide sequence”, “exogenous nucleic acid molecule”, or “exogenous DNA segment”, as used herein, each refer to a sequence that originates from a source foreign to an intended host cell or, if from the same source, is modified from its original form. Thus, a heterologous gene in a host cell includes a gene that is endogenous to the particular host cell but has been modified, for example by mutagenesis or by isolation from native cis-regulatory sequences. The terms also include non-naturally occurring multiple copies of a naturally occurring nucleotide sequence. Thus, the terms refer to a DNA segment that is foreign or heterologous to the cell, or homologous to the cell but in a position within the host cell nucleic acid wherein the element is not ordinarily found.

[0065] The term “promoter region” defines a nucleotide sequence within a gene that is positioned 5′ to a coding sequence of a same gene and functions to direct transcription of the coding sequence. The promoter region includes a transcriptional start site and at least one cis-regulatory element. The present invention encompasses nucleic acid sequences that comprise a promoter region of a MS4A gene, or functional portion thereof.

[0066] The term “cis-acting regulatory sequence” or “cis-regulatory motif” or “response element”, as used herein, each refer to a nucleotide sequence that enables responsiveness to a regulatory transcription factor.

[0067] Responsiveness can encompass a decrease or an increase in transcriptional output and is mediated by binding of the transcription factor to the DNA molecule comprising the response element.

[0068] The term “transcription factor” generally refers to a protein that modulates gene expression by interaction with the cis-regulatory element and cellular components for transcription, including RNA Polymerase, Transcription Associated Factors (TAFs), chromatin-remodeling proteins, and any other relevant protein that impacts gene transcription.

[0069] A “functional portion” of a promoter gene fragment is a nucleotide sequence within a promoter region that is required for normal gene transcription. To determine nucleotide sequences that are functional, the expression of a reporter gene is assayed when variably placed under the direction of a promoter region fragment.

[0070] Promoter region fragments can be conveniently made by enzymatic digestion of a larger fragment using restriction endonucleases or DNAse I. Preferably, a functional promoter region fragment comprises about 5000 nucleotides, more preferably 2000 nucleotides, more preferably about 1000 nucleotides. Even more preferably a functional promoter region fragment comprises about 500 nucleotides, even more preferably a functional promoter region fragment comprises about 100 nucleotides, and even more preferably a functional promoter region fragment comprises about 20 nucleotides.

[0071] The terms “reporter gene” or “marker gene” or “selectable marker” each refer to a heterologous gene encoding a product that is readily observed and/or quantitated. A reporter gene is heterologous in that it originates from a source foreign to an intended host cell or, if from the same source, is modified from its original form. Non-limiting examples of detectable reporter genes that can be operably linked to a transcriptional regulatory region can be found in Alam & Cook (1990) Anal Biochem 188:245-254 and PCT International Publication No. WO 97/47763. Preferred reporter genes for transcriptional analyses include the lacZ gene (See, e.g., Rose & Botstein (1983) Meth Enzymol 101:167-180), Green Fluorescent Protein (GFP) (Cubiff et al. (1995) Trends Biochem Sci 20:448-455), luciferase, or chloramphenicol acetyl transferase (CAT). Preferred reporter genes for methods to produce transgenic animals include but are not limited to antibiotic resistance genes, and more preferably the antibiotic resistance gene confers neomycin resistance. Any suitable reporter and detection method can be used, and it will be appreciated by one of skill in the art that no particular choice is essential to or a limitation of the present invention.

[0072] An amount of reporter gene can be assayed by any method for qualitatively or preferably, quantitatively determining presence or activity of the reporter gene product. The amount of reporter gene expression directed by each test promoter region fragment is compared to an amount of reporter gene expression to a control construct comprising the reporter gene in the absence of a promoter region fragment. A promoter region fragment is identified as having promoter activity when there is significant increase in an amount of reporter gene expression in a test construct as compared to a control construct. The term “significant increase”, as used herein, refers to an quantified change in a measurable quality that is larger than the margin of error inherent in the measurement technique, preferably an increase by about 2-fold or greater relative to a control measurement, more preferably an increase by about 5-fold or greater, and most preferably an increase by about 10-fold or greater.

[0073] The present invention further includes vectors comprising the disclosed MS4A sequences, including plasmids, cosmids, and viral vectors. The term “vector”, as used herein refers to a DNA molecule having sequences that enable its replication in a compatible host cell. A vector also includes nucleotide sequences to permit ligation of nucleotide sequences within the vector, wherein such nucleotide sequences are also replicated in a compatible host cell. A vector can also mediate recombinant production of a MS4A polypeptide, as described further herein below. Preferred vectors include but are not limited to pBluescript (Stratagene), pUC18, pBLCAT3 (Luckow & Schutz (1987) Nucleic Acids Res 15:5490), pLNTK (Gorman et al. (1996) Immunity 5:241-252), and pBAD/gIII (Stratagene). A preferred host cell is a mammalian cell; more preferably the cell is a Chinese hamster ovary cell, a HeLa cell, a baby hamster kidney cell, or a mouse cell; even more preferably the cell is a human cell.

[0074] Nucleic acids of the present invention can be cloned, synthesized, recombinantly altered, mutagenized, or combinations thereof. Standard recombinant DNA and molecular cloning techniques used to isolate nucleic acids are well known in the art. Exemplary, non-limiting methods are described by Sambrook et al., eds. (1989); by Silhavy et al. (1984) Experiments with Gene Fusions, Cold Spring Harbor Laboratory Press, Cold Spring Harbor, N.Y.; by Ausubel et al. (1992) Current Protocols in Molecular Biology, John Wylie and Sons, Inc., New York, N.Y.; and by Glover, ed. (1985) DNA Cloning: A Practical Approach, MRL Press, Ltd., Oxford, United Kingdom. Site-specific mutagenesis to create base pair changes, deletions, or small insertions are also well known in the art as exemplified by publications, see, e.g., Adelman et al., (1983) DNA 2:183; Sambrook et al. (1989).

[0075] Sequences detected by methods of the invention can be detected, subcloned, sequenced, and further evaluated by any measure well known in the art using any method usually applied to the detection of a specific DNA sequence including but not limited to dideoxy sequencing, PCR, oligomer restriction (Saiki et al. (1985) Bio/Technology 3:1008-1012), allele-specific oligonucleotide (ASO) probe analysis (Conner et al. (1983) Proc Natl Acad Sci USA 80:278), and oligonucleotide ligation assays (OLAs) (Landgren et. al. (1988) Science 241:1007). Molecular techniques for DNA analysis have been reviewed (Landgren et. al. (1988) Science 242:229-237).

[0076] I.B. MS4A Polypeptides

[0077] The polypeptides provided by the present invention include the isolated polypeptides set forth as the even-numbered SEQ ID NOs:2-38, polypeptides substantially similar to the even-numbered SEQ ID NOs:2-38, MS4A polypeptide fragments, fusion proteins comprising MS4A amino acid sequences, biologically functional analogs, and polypeptides that cross-react with an antibody that specifically recognizes a MS4A polypeptide.

[0078] The term “isolated”, as used in the context of a polypeptide, indicates that the polypeptide exists apart from its native environment and is not a product of nature. An isolated polypeptide can exist in a purified form or can exist in a non-native environment such as, for example, in a transgenic host cell.

[0079] The term “purified”, when applied to a polypeptide, denotes that the polypeptide is essentially free of other cellular components with which it is associated in the natural state. Preferably, a polypeptide is a homogeneous solid or aqueous solution. Purity and homogeneity are typically determined using analytical chemistry techniques such as polyacrylamide gel electrophoresis or high performance liquid chromatography. A polypeptide which is the predominant species present in a preparation is substantially purified. The term “purified” denotes that a polypeptide gives rise to essentially one band in an electrophoretic gel. Particularly, it means that the polypeptide is at least about 50% pure, more preferably at least about 85% pure, and most preferably at least about 99% pure.

[0080] The term “substantially identical” in the context of two or more polypeptides sequences is measured by (a) polypeptide sequences having about 35%, or 45%, or preferably from 45-55%, or more preferably 55-65%, or most preferably 65% or greater amino acids which are identical or functionally equivalent. Percent “identity” and methods for determining identity are defined herein below under the heading Nucleotide and Amino Acid Sequence Comparisons.

[0081] Substantially identical polypeptides also encompass two or more polypeptides sharing a conserved three-dimensional structure. Computational methods can be used to compare structural representations, and structural models can be generated and easily tuned to identify similarities around important active sites or ligand binding sites. See Henikoff et al. (2000) Electrophoresis 21(9):1700-1706; Huang et al. (2000) Pac Symp Biocomput 230-241; Saqi et al. (1999) Bioinformatics 15(6):521-522; and Barton (1998) Acta Crystallogr D Biol Crystallogr 54:1139-1146.

[0082] The term “functionally equivalent” in the context of amino acid sequences is well known in the art and is based on the relative similarity of the amino acid side-chain substituents. See Henikoff & Henikoff (2000) Adv Protein Chem 54:73-97. Relevant factors for consideration include side-chain hydrophobicity, hydrophilicity, charge, and size. For example, arginine, lysine, and histidine are all positively charged residues; that alanine, glycine, and serine are all of similar size; and that phenylalanine, tryptophan, and tyrosine all have a generally similar shape. By this analysis, described further herein below, arginine, lysine, and histidine; alanine, glycine, and serine; and phenylalanine, tryptophan, and tyrosine; are defined herein as biologically functional equivalents.

[0083] In making biologically functional equivalent amino acid substitutions, the hydropathic index of amino acids can be considered. Each amino acid has been assigned a hydropathic index on the basis of their hydrophobicity and charge characteristics, these are: isoleucine (+4.5); valine (+4.2); leucine (+3.8); phenylalanine (+2.8); cysteine (+2.5); methionine (+1.9); alanine (+1.8); glycine (−0.4); threonine (−0.7); serine (−0.8); tryptophan (−0.9); tyrosine (−1.3); proline (−1.6); histidine (−3.2); glutamate (−3.5); glutamine (−3.5); aspartate (−3.5); asparagine (−3.5); lysine (−3.9); and arginine (4.5).

[0084] The importance of the hydropathic amino acid index in conferring interactive biological function on a protein is generally understood in the art (Kyte et al. (1982) J Mol Biol 157:105.). It is known that certain amino acids can be substituted for other amino acids having a similar hydropathic index or score and still retain a similar biological activity. In making changes based upon the hydropathic index, the substitution of amino acids whose hydropathic indices are within ±2 of the original value is preferred, those which are within ±1 of the original value are particularly preferred, and those within ±0.5 of the original value are even more particularly preferred.

[0085] It is also understood in the art that the substitution of like amino acids can be made effectively on the basis of hydrophilicity. U.S. Pat. No. 4,554,101 states that the greatest local average hydrophilicity of a protein, as governed by the hydrophilicity of its adjacent amino acids, correlates with its immunogenicity and antigenicity, i.e. with a biological property of the protein. It is understood that an amino acid can be substituted for another having a similar hydrophilicity value and still obtain a biologically equivalent protein.

[0086] As detailed in U.S. Pat. No. 4,554,101, the following hydrophilicity values have been assigned to amino acid residues: arginine (+3.0); lysine (+3.0); aspartate (+3.0±1); glutamate (+3.0±1); serine (+0.3); asparagine (+0.2); glutamine (+0.2); glycine (0); threonine (−0.4); proline (−0.5±1); alanine (−0.5); histidine (−0.5); cysteine (−1.0); methionine (−1.3); valine (−1.5); leucine (−1.8); isoleucine (−1.8); tyrosine (−2.3); phenylalanine (−2.5); tryptophan (−3.4).

[0087] In making changes based upon similar hydrophilicity values, the substitution of amino acids whose hydrophilicity values are within ±2 of the original value is preferred, those which are within ±1 of the original value are particularly preferred, and those within ±0.5 of the original value are even more particularly preferred.

[0088] The present invention also encompasses MS4A polypeptide fragments or functional portions of a MS4A polypeptide. Such functional portion need not comprise all or substantially all of the amino acid sequence of a native MS4A gene product. The term “functional” includes any biological activity or feature of MS4A, including immunogenicity.

[0089] The present invention also includes longer sequences of a MS4A polypeptide, or portion thereof. For example, one or more amino acids can be added to the N-terminus or C-terminus of a MS4A polypeptide. Fusion proteins comprising MS4A polypeptide sequences are also provided within the scope of the present invention. Methods of preparing such proteins are known in the art.

[0090] The present invention also encompasses functional analogs of a MS4A polypeptide. Functional analogs share at least one biological function with a MS4A polypeptide. An exemplary function is immunogenicity. In the context of amino acid sequence, biologically functional analogs, as used herein, are peptides in which certain, but not most or all, of the amino acids can be substituted. Functional analogs can be created at the level of the corresponding nucleic acid molecule, altering such sequence to encode desired amino acid changes. In one embodiment, changes can be introduced to improve the antigenicity of the protein. In another embodiment, a MS4A polypeptide sequence is varied so as to assess the activity of a mutant MS4A polypeptide.

[0091] The present invention also encompasses recombinant production of the disclosed MS4A polypeptides. Briefly, a nucleic acid sequence encoding a MS4A polypeptide, or portion thereof, is cloned into a expression cassette, the cassette is introduced into a host organism, where it is recombinantly produced.

[0092] The term “expression cassette” as used herein means a DNA sequence capable of directing expression of a particular nucleotide sequence in an appropriate host cell, comprising a promoter operably linked to the nucleotide sequence of interest which is operably linked to termination signals. It also typically comprises sequences required for proper translation of the nucleotide sequence. The expression cassette comprising the nucleotide sequence of interest can be chimeric. The expression cassette can also be one which is naturally occurring but has been obtained in a recombinant form useful for heterologous expression.

[0093] The expression of the nucleotide sequence in the expression cassette can be under the control of a constitutive promoter or an inducible promoter which initiates transcription only when the host cell is exposed to some particular external stimulus. Exemplary promoters include Simian virus 40 early promoter, a long terminal repeat promoter from retrovirus, an action promoter, a heat shock promoter, and a metallothien protein. In the case of a multicellular organism, the promoter and promoter region can direct expression to a particular tissue or organ or stage of development. Exemplary tissue-specific promoter regions include a MS4A promoter, described herein. Suitable expression vectors which can be used include, but are not limited to, the following vectors or their derivatives: human or animal viruses such as vaccinia virus or adenovirus, yeast vectors, bacteriophage vectors (e.g., lambda phage), and plasmid and cosmids DNA vectors.

[0094] The term “host cell”, as used herein, refers to a cell into which a heterologous nucleic acid molecule has been introduced. Transformed cells, tissues, or organisms are understood to encompass not only the end product of a transformation process, but also transgenic progeny thereof.

[0095] A host cell strain can be chosen which modulates the expression of the inserted sequences, or modifies and processes the gene product in the specific fashion desired. For example, different host cells have characteristic and specific mechanisms for the translational and post-transactional processing and modification (e.g., glycosylation, phosphorylation of proteins). Appropriate cell lines or host systems can be chosen to ensure the desired modification and processing of the foreign protein expressed. Expression in a bacterial system can be used to produce a non-glycosylated core protein product. Expression in yeast will produce a glycosylated product. Expression in animal cells can be used to ensure “native” glycosylation of a heterologous protein.

[0096] Expression constructs are transfected into a host cell by any standard method, including electroporation, calcium phosphate precipitation, DEAE-Dextran transfection, liposome-mediated transfection, and infection using a retrovirus. The MS4A-encoding nucleotide sequence carried in the expression construct can be stably integrated into the genome of the host or it can be present as an extrachromosomal molecule.

[0097] Isolated polypeptides and recombinantly produced polypeptides can be purified and characterized using a variety of standard techniques that are well known to the skilled artisan. See e.g. Ausubel et al. (1992), Bodanszky, et al. (1976) Peptide Synthesis, John Wiley and Sons, Second Edition, New York, N.Y. and Zimmer et al. (1993) Peptides, pp. 393-394, ESCOM Science Publishers, B. V.

[0098] I.C. Nucleotide and Amino Acid Sequence Comparisons

[0099] The terms “identical” or percent “identity” in the context of two or more nucleotide or polypeptide sequences, refer to two or more sequences or subsequences that are the same or have a specified percentage of amino acid residues or nucleotides that are the same, when compared and aligned for maximum correspondence, as measured using one of the sequence comparison algorithms disclosed herein or by visual inspection.

[0100] The term “substantially identical” in regards to a nucleotide or polypeptide sequence means that a particular sequence varies from the sequence of a naturally occurring sequence by one or more deletions, substitutions, or additions, the net effect of which is to retain at least some of biological activity of the natural gene, gene product, or sequence. Such sequences include “mutant” sequences, or sequences wherein the biological activity is altered to some degree but retains at least some of the original biological activity. The term “naturally occurring”, as used herein, is used to describe a composition that can be found in nature as distinct from being artificially produced by man. For example, a protein or nucleotide sequence present in an organism, which can be isolated from a source in nature and which has not been intentionally modified by man in the laboratory, is naturally occurring.

[0101] For sequence comparison, typically one sequence acts as a reference sequence to which test sequences are compared. When using a sequence comparison algorithm, test and reference sequences are entered into a computer program, subsequence coordinates are designated if necessary, and sequence algorithm program parameters are selected. The sequence comparison algorithm then calculates the percent sequence identity for the designated test sequence(s) relative to the reference sequence, based on the selected program parameters.

[0102] Optimal alignment of sequences for comparison can be conducted, e.g., by the local homology algorithm of Smith & Waterman (1981) Adv Appl Math 2:482, by the homology alignment algorithm of Needleman & Wunsch (1970) J Mol Biol 48:443, by the search for similarity method of Pearson & Lipman (1988) Proc Natl Acad Sci USA 85:2444-2448, by computerized implementations of these algorithms (GAP, BESTFIT, FASTA, and TFASTA in the Wisconsin Genetics Software Package, Genetics Computer Group, Madison, Wis.), or by visual inspection. See generally, Ausubel et al., 1992.

[0103] A preferred algorithm for determining percent sequence identity and sequence similarity is the BLAST algorithm, which is described in Altschul et al. (1990) J Mol Biol 215: 403-410. Software for performing BLAST analyses is publicly available through the National Center for Biotechnology Information (http://www.ncbi.nlm.nih.gov/). This algorithm involves first identifying high scoring sequence pairs (HSPs) by identifying short words of length W in the query sequence, which either match or satisfy some positive-valued threshold score T when aligned with a word of the same length in a database sequence. T is referred to as the neighborhood word score threshold. These initial neighborhood word hits act as seeds for initiating searches to find longer HSPs containing them. The word hits are then extended in both directions along each sequence for as far as the cumulative alignment score can be increased. Cumulative scores are calculated using, for nucleotide sequences, the parameters M (reward score for a pair of matching residues; always >0) and N (penalty score for mismatching residues; always <0). For amino acid sequences, a scoring matrix is used to calculate the cumulative score. Extension of the word hits in each direction are halted when the cumulative alignment score falls off by the quantity X from its maximum achieved value, the cumulative score goes to zero or below due to the accumulation of one or more negative-scoring residue alignments, or the end of either sequence is reached. The BLAST algorithm parameters W, T, and X determine the sensitivity and speed of the alignment. The BLASTN program (for nucleotide sequences) uses as defaults a wordlength W=11, an expectation E=10, a cutoff of 100, M=5, N=−4, and a comparison of both strands. For amino acid sequences, the BLASTP program uses as defaults a wordlength (W) of 3, an expectation (E) of 10, and the BLOSUM62 scoring matrix. See Henikoff & Henikoff (1989) Proc Natl Acad Sci USA 89:10915.

[0104] In addition to calculating percent sequence identity, the BLAST algorithm also performs a statistical analysis of the similarity between two sequences. See e.g., Karlin and Altschul (1993) Proc Natl Acad Sci USA 90:5873-5887. One measure of similarity provided by the BLAST algorithm is the smallest sum probability (P(N)), which provides an indication of the probability by which a match between two nucleotide or amino acid sequences would occur by chance. For example, a test nucleic acid sequence is considered similar to a reference sequence if the smallest sum probability in a comparison of the test nucleic acid sequence to the reference nucleic acid sequence is less than about 0.1, more preferably less than about 0.01, and most preferably less than about 0.001.

[0105] I.D. Antibodies

[0106] The present invention also provides an antibody that specifically binds a MS4A polypeptide. The term “antibody” indicates an immunoglobulin protein, or functional portion thereof, including a polyclonal antibody, a monoclonal antibody, a chimeric antibody, a single chain antibody, Fab fragments, and an Fab expression library. “Functional portion” refers to the part of the protein that binds a molecule of interest. In a preferred embodiment, an antibody of the invention is a monoclonal antibody. Techniques for preparing and characterizing antibodies are well known in the art (See, e.g., Harlow & Lane (1988) Antibodies: A Laboratory Manual, Cold Spring Harbor Laboratory Press, Cold Spring Harbor, N.Y.). A monoclonal antibody of the present invention can be readily prepared through use of well-known techniques such as the hybridoma techniques exemplified in U.S. Pat. No. 4,196,265 and the phage-displayed techniques disclosed in U.S. Pat. No. 5,260,203.

[0107] The phrase “specifically (or selectively) binds to an antibody”, or “specifically (or selectively) immunoreactive with”, when referring to a protein or peptide, refers to a binding reaction which is determinative of the presence of the protein in a heterogeneous population of proteins and other biological materials. Thus, under designated immunoassay conditions, the specified antibodies bind to a particular protein and do not show significant binding to other proteins present in the sample. Specific binding to an antibody under such conditions can require an antibody that is selected for its specificity for a particular protein. For example, antibodies raised to a protein with an amino acid sequence encoded by any of the nucleic acid sequences of the invention can be selected to obtain antibodies specifically immunoreactive with that protein and not with unrelated proteins.

[0108] The use of a molecular cloning approach to generate antibodies, particularly monoclonal antibodies, and more particularly single chain monoclonal antibodies, are also provided. The production of single chain antibodies has been described in the art. See, e.g., U.S. Pat. No. 5,260,203. For this approach, combinatorial immunoglobulin phagemid libraries are prepared from RNA isolated from the spleen of the immunized animal, and phagemids expressing appropriate antibodies are selected by panning on endothelial tissue. The advantages of this approach over conventional hybridoma techniques are that approximately 10⁴ times as many antibodies can be produced and screened in a single round, and that new specificities are generated by heavy (H) and light (L) chain combinations in a single chain, which further increases the chance of finding appropriate antibodies. Thus, an antibody of the present invention, or a “derivative” of an antibody of the present invention, pertains to a single polypeptide chain binding molecule which has binding specificity and affinity substantially similar to the binding specificity and affinity of the light and heavy chain aggregate variable region of an antibody described herein.

[0109] The term “immunochemical reaction”, as used herein, refers to any of a variety of immunoassay formats used to detect antibodies specifically bound to a particular protein, including but not limited to competitive and non-competitive assay systems using techniques such as radioimmunoassays, ELISA (enzyme linked immunosorbent assay), “sandwich” immunoassays, immunoradiometric assays, gel diffusion precipitation reactions, immunodiffusion assays, in situ immunoassays (e.g., using colloidal gold, enzyme or radioisotope labels), western blots, precipitation reactions, agglutination assays (e.g., gel agglutination assays, hemagglutination assays), complement fixation assays, immunofluorescence assays, protein A assays, and immunoelectrophoresis assays, etc. See Harlow & Lane (1988) for a description of immunoassay formats and conditions.

[0110] I.E. Protein Binding Assays

[0111] The term “binding” refers to an affinity between two molecules, for example, a ligand and a receptor. As used herein, “binding” means a preferential binding of one molecule for another in a mixture of molecules. The binding of the molecules can be considered specific if the binding affinity is about 1×10⁴ M⁻¹ to about 1×10⁶ M⁻¹ or greater. Binding of two molecules also encompasses a quality or state of mutual action such that an activity of one protein or compound on another protein is inhibitory (in the case of an antagonist) or enhancing (in the case of an agonist). Exemplary protein binding assays include but are not limited to Fluorescence Correlation Spectroscopy (FCS), Surface-Enhanced Laser Desorption/Ionization time-of-flight mass spectrometry (SELDI-TOF), and Biacore, each described further herein below.

[0112] Fluorescence Correlation Spectroscopy (FCS) measures the average diffusion rate of a fluorescent molecule within a small sample volume (Madge et al. (1972) Phys Rev Left 29:705-708; Maiti et al. (1997) Proc Natl Acad Sci USA, 94:11753-11757). The sample size can be as low as 10³ fluorescent molecules and the sample volume as low as the cytoplasm of a single bacterium. The diffusion rate is a function of the mass of the molecule and decreases as the mass increases. FCS can therefore be applied to protein-ligand interaction analysis by measuring the change in mass and therefore in diffusion rate of a molecule upon binding. In a typical experiment, the target to be analyzed is expressed as a recombinant protein with a sequence tag, such as a poly-histidine sequence, inserted at the N-terminus or C-terminus. The expression takes place in E. coli, yeast or mammalian cells. The protein is purified using chromatographic methods. For example, the poly-histidine tag can be used to bind the expressed protein to a metal chelate column such as Ni²⁺ chelated on iminodiacetic acid agarose. The protein is then labeled with a fluorescent tag such as carboxytetramethylrhodamine or BODIPY™ (Molecular Probes, Eugene, Oreg.). The protein is then exposed in solution to the potential ligand, and its diffusion rate is determined by FCS using instrumentation available from Carl Zeiss, Inc. (Thornwood, N.Y.). Ligand binding is determined by changes in the diffusion rate of the protein.

[0113] Surface-Enhanced Laser Desorption/Ionization (SELDI) was developed by Hutchens & Yip (1993) Rapid Commun Mass Spectrom 7:576-580). When coupled to a time-of-flight mass spectrometer (TOF), SELDI provides a means to rapidly analyze molecules retained on a chip. It can be applied to ligand-protein interaction analysis by covalently binding the target protein on the chip and analyzing by MS the small molecules that bind to this protein (Worrall et al. (1998) Anal Biochem 70:750-756). In a typical experiment, the target to be analyzed is expressed as described for FCS. The purified protein is then used in the assay without further preparation. It is bound to the SELDI chip either by utilizing the poly-histidine tag or by other interaction such as ion exchange or hydrophobic interaction. The chip thus prepared is then exposed to the potential ligand via, for example, a delivery system able to pipet the ligands in a sequential manner (autosampler). The chip is then washed in solutions of increasing stringency, for example a series of washes with buffer solutions containing an increasing ionic strength. After each wash, the bound material is analyzed by submitting the chip to SELDI-TOF. Ligands that specifically bind the target are identified by the stringency of the wash needed to elute them.

[0114] Biacore relies on changes in the refractive index at the surface layer upon binding of a ligand to a protein immobilized on the layer. In this system, a collection of small ligands is injected sequentially in a 2-5 microliter cell, wherein the protein is immobilized within the cell. Binding is detected by surface plasmon resonance (SPR) by recording laser light refracting from the surface. In general, the refractive index change for a given change of mass concentration at the surface layer is practically the same for all proteins and peptides, allowing a single method to be applicable for any protein (Liedberg et al. (1983) Sensors Actuators 4:299-304; Malmquist (1993) Nature 361:186-187). In a typical experiment, the target to be analyzed is expressed as described for FCS. The purified protein is then used in the assay without further preparation. It is bound to the Biacore chip either by utilizing the poly-histidine tag or by other interaction such as ion exchange or hydrophobic interaction. The chip thus prepared is then exposed to the potential ligand via the delivery system incorporated in the instruments sold by Biacore (Uppsala, Sweden) to pipet the ligands in a sequential manner (autosampler). The SPR signal on the chip is recorded and changes in the refractive index indicate an interaction between the immobilized target and the ligand. Analysis of the signal kinetics of on rate and off rate allows the discrimination between non-specific and specific interaction.

[0115] I.F. Transgenic Animals

[0116] It is also within the scope of the present invention to prepare a transgenic animal to mutagenize the MS4A locus or to express a transgene comprising nucleic acid sequences of the present invention. The term “transgenic animal”, indicates an animal comprising a germline insertion of a heterologous nucleic acid. Transgenic animals of the present invention are understood to encompass not only the end product of a transformation method, but also transgenic progeny thereof.

[0117] The term “transgene”, as used herein indicates a heterologous nucleic acid molecule that has been transformed into a host cell. For intended use in the creation of a transgenic animal, the transgene includes genomic sequences of the host organism at a selected locus or site of transgene integration to mediate a homologous recombination event. A transgene further comprises nucleic acid sequences of interest, for example a targeted modification of the gene residing within the locus, a reporter gene, or a expression cassette, each defined herein above.

[0118] Transgene integration can be used to create gene mutations, including “knock-out”, “knock-in”, or a “knock-down” mutations. Representative approaches are disclosed in the Examples presented below. The term “knock-out” refers to a homologous recombination event that renders a gene inactive. Gene knock-out is generally accomplished by integration of the transgene at a chromosomal loci, thereby interrupting a gene residing at that loci. The term “knock-in” refers to in vivo replacement at a targeted locus. Knock-in mutations can modify a gene sequence to create a loss-of-function or gain-of-function mutation. The term “gene knock-down” refers to a homologous recombination event wherein the transgene partially eliminates gene function. A knock-down animal can be created by transgenic expression of an antisense molecule, wherein a transgene comprising the antisense sequence and a relevant promoter are integrated into the genome at a non-essential loci. Expression of the antisense or ribozyme molecule disrupts the corresponding gene function, although this disruption is generally incomplete (Luyckx et al. (1999) Proc Natl Acad Sci U S A 96(21):12174-12179).

[0119] Conditional mutation can be accomplished using transgenic methods in combination with the Cre-recombinase system in mice. Briefly, in one instance, a transgenic mouse is derived that expresses Cre-recombinase under the direction of an inducible promoter. A second transgenic mouse bears a mutation of a gene of interest as well as a lox-P-flanked endogenous gene sequence. Such transgenic mice are mated, the resulting progeny having both the Cre-recombinase and lox-P-flanked transgenes. Induction of Cre recombinase catalyzes excision of the lox-P-flanked transgene, thereby excising a portion of the endogenous gene sequence and revealing the mutated sequence. Conditional knockout can be varied according to the temporal and spatial features of Cre recombinase expression, inherent in the selection of a promoter to drive Cre recombinase. See Postic et al. (1999) J Biol Chem 275(1):305-315; and Sauer (1998) Methods 14(4):381-392.

[0120] Transgenes can also be used for heterologous expression in a host organism without generating phenotypically apparent mutations. By this method, nucleotide sequences of interest are introduced into the genome at a nonessential loci, whereby insertion alone does not disrupt an essential gene function. Optionally, expression of the transgene can generate a gain-of-function or ectopic function phenotype.

[0121] Techniques for the preparation of transgenic animals are known in the art. Exemplary techniques are described in U.S. Pat. No. 5,489,742 (transgenic rats); U.S. Pat. Nos. 4,736,866, 5,550,316, 5,614,396, 5,625,125 and 5,648,061 (transgenic mice); U.S. Pat. No. 5,573,933 (transgenic pigs); U.S. Pat. No. 5,162,215 (transgenic avian species) and U.S. Pat. No. 5,741,957 (transgenic bovine species). Briefly, nucleotide sequences of interest are cloned into a vector, and the construct is transformed into a germ cell. In the germ cell, a chromosomal rearrangement event takes place wherein the nucleic acid sequences of interest are integrated into the genome of the germ cell by homologous recombination. Fertilization and propagation of the transformed germ cell results in a transgenic animal. Homozygosity of the mutation is accomplished by intercrossing.

[0122] I.G. Therapeutic Methods

[0123] The present invention further provides methods for discovering substances that can be used as pharmaceutical compositions. The term “pharmaceutical composition” or “drug” as used herein, each refer to any substance having a biological activity. Substances discovered by methods of the present invention include but are not limited to polypeptide, proteins, peptides, chemical compounds, and antibodies.

[0124] A composition of the present invention is typically formulated using acceptable vehicles, adjuvants, and carriers as desired.

[0125] Among the acceptable vehicles and solvents that can be employed are water, Ringer's solution, and isotonic sodium chloride solution. In addition, sterile, fixed oils are conventionally employed as a solvent or suspending medium. For this purpose any bland fixed oil can be employed including synthetic mono- or di-glycerides. In addition, fatty acids such as oleic acid find use in the preparation of injectable compositions.

[0126] Injectable preparations, for example sterile injectable aqueous or oleaginous suspensions, are formulated according to the known art using suitable dispersing or wetting agents and suspending agents. The sterile injectable preparation can also be a sterile injectable solution or suspension in a nontoxic diluent or solvent, for example 1,3-butanediol.

[0127] A vector can be used as a carrier, for example an adenovirus vector, can be used for gene therapy methods. The vector is purified to sufficiently render it essentially free of undesirable contaminants, such as defective interfering adenovirus particles or endotoxins and other pyrogens such that it does not cause any untoward reactions in the individual receiving the vector construct. A preferred means of purifying the vector involves the use of buoyant density gradients, such as cesium chloride gradient centrifugation.

[0128] A transfected cell can also serve as a carrier. By way of example a liver cell can be removed from an organism, transfected with a nucleic acid sequence of the present invention using methods set forth above and then the transfected cell returned to the organism (e.g. injected intra-vascularly).

[0129] Monoclonal antibodies or polypeptides of the invention can be administered parenterally by injection or by gradual infusion over time. Although the tissue to be treated can typically be accessed in the body by systemic administration and therefore most often treated by intravenous administration of therapeutic compositions, other tissues and delivery means are provided where there is a likelihood that the tissue targeted contains the target molecule and are known to those of skill in the art.

[0130] Representative antibodies for use in the present invention are intact immunoglobulin molecules, substantially intact immunoglobulin molecules, single chain immunoglobulins or antibodies, those portions of an immunoglobulin molecule that contain the paratope, including antibody fragments. It is within the scope of the present invention that a monovalent modulator can optionally be used.

[0131] Methods of preparing “humanized” antibodies are generally well known in the art, and can readily be applied to the antibodies of the present invention. Humanized monoclonal antibodies offer particular advantages over monoclonal antibodies derived from other mammals, particularly insofar as they can be used therapeutically in humans. Specifically, humanized antibodies are not cleared from the circulation as rapidly as “foreign” antigens, and do not activate the immune system in the same manner as foreign antigens and foreign antibodies.

[0132] With respect to the therapeutic methods of the present invention, a preferred subject is a vertebrate subject. A preferred vertebrate is warm-blooded; a preferred warm-blooded vertebrate is a mammal. A preferred mammal is a mouse or, most preferably, a human. As used herein and in the claims, the term “patient” includes both human and animal patients. Thus, veterinary therapeutic uses are provided in accordance with the present invention.

[0133] Also provided is the treatment of mammals such as humans, as well as those mammals of importance due to being endangered, such as Siberian tigers; of economical importance, such as animals raised on farms for consumption by humans; and/or animals of social importance to humans, such as animals kept as pets or in zoos. Examples of such animals include but are not limited to: carnivores such as cats and dogs; swine, including pigs, hogs, and wild boars; ruminants and/or ungulates such as cattle, oxen, sheep, giraffes, deer, goats, bison, and camels; and horses. Also provided is the treatment of birds, including the treatment of those kinds of birds that are endangered and/or kept in zoos, as well as fowl, and more particularly domesticated fowl, i.e., poultry, such as turkeys, chickens, ducks, geese, guinea fowl, and the like, as they are also of economical importance to humans. Thus, provided is the treatment of livestock, including, but not limited to, domesticated swine, ruminants, ungulates, horses, poultry, and the like.

[0134] As used herein, the term “experimental subject” refers to any subject or sample in which the desired measurement is unknown. The term “control subject” refers to any subject or sample in which a desired measure is unknown.

[0135] As used herein, an “effective” dose refers to a dose(s) administered to an individual patient sufficient to cause a change in MS4A activity. One of ordinary skill in the art can tailor the dosages to an individual patient, taking into account the particular formulation and method of administration to be used with the composition as well as patient height, weight, severity of symptoms, and stage of the biological condition to be treated. Such adjustments or variations, as well as evaluation of when and how to make such adjustments or variations, are well known to those of ordinary skill in the art of medicine.

[0136] A therapeutically effective amount can comprise a range of amounts. One skilled in the art can readily assess the potency and efficacy of a MS4A modulator of this invention and adjust the therapeutic regimen accordingly. A modulator of MS4A biological activity can be evaluated by a variety of means including the use of a responsive reporter gene, interaction of MS4A polypeptides with a monoclonal antibody, analysis of cell subpopulations, and measurement of [Ca²⁺]ᵢ levels, each technique described herein.

[0137] Additional formulation and dose techniques have been described in the art, see for example, those described in U.S. Pat. Nos. 5,326,902 and 5,234,933, and International Publication No. WO 93/25521.

[0138] For the purposes described above, the identified substances can normally be administered systemically, parenterally, or orally. The term “parenteral” as used herein includes intravenous, intramuscular, intra-arterial injection, or infusion techniques. Other compositions for administration include liquids for external use, and endermic liniments (ointment, etc.), suppositories, and pessaries which comprise one or more of the active substance(s) and can be prepared by known methods.

II. CD20 Gene Family Members

[0139] II.A. Identification of CD20 Gene Family Members

[0140] The present invention provides MS4A nucleic acid and polypeptide sequences. Preferably, a MS4A gene comprises the sequence set forth as any one of the odd-numbered SEQ ID NOs:1-37, a nucleic acid molecule that is substantially similar to any one of the odd-numbered SEQ ID NOs:1-37, or a nucleic acid molecule comprising a 20 base pair nucleotide sequence that is identical to a contiguous 20 base pair sequence of any one of the odd-numbered SEQ ID NOs:1-37.

[0141] To identify new CD20 gene family members, the human and mouse CD20 amino acid sequences (Tedder et al., 1988a; Tedder et al., 1988b) were used to search the translated GenBank databases, including expressed sequence tags, using the BLAST program (Altschul et al., 1997).

[0142] Among 337 homologous sequences identified, at least 17 novel genes expressed by mouse, human, and pig had predicted amino acid sequences homologous to CD20. Complete coding regions were predicted using overlapping nucleotide sequences obtained from sequenced ESTs and cDNAs that corresponded to unique, near full-length transcripts in humans and mice (FIG. 1). All nucleotide sequences were verified by sequencing multiple near full-length cDNAs isolated by applicants and 40 cDNAs obtained from the ATCC (American Tissue Culture Collection, Bethesda, Md., USA). In addition, a pig cDNA and its human counterpart homologous to CD20 were identified as GenBank submissions AJ236932.1 and AK000224, respectively. In total, unique cDNA clones were identified that encode at least 16 distinct full-length CD20-like proteins.

[0143] Complete cDNA sequences encoding the human and mouse MS4A family members (MS4A1, -A2, -A3, -A4A, -A5, -A6A, -A7, -A8B and -A12) were also used to search the GenBank human genomic database (htgs; http://www.ncbi.nlm.nih.gov/blast/) using the BLAST program (Altschul et al., 1997), as further described in Example 2. Two-hundred-twenty different contigs or distinct genomic DNA sequences were identified in the database of unfinished human genomic sequences that were either identical or similar to MS4A family members. These sequences were predominantly derived from sixteen partially sequenced bacterial artificial chromosomes (BACs) that spanned 400-500 kb of human chromosome 11q12 (Table 1). Based on known cDNA sequences of MS4A family members, we were able to order and arrange these genomic sequences into overlapping continuous DNA segments. Since many of the contigs identified were overlapping, it was thereby possible to assemble long DNA sequences that encoded entire MS4A genes or portions of MS4A genes. Gaps between exon encoding DNA sequences were filled in many cases by additional sequence homology searches using DNA sequences found at the ends of gaps. When sequence differences were observed between different overlapping DNA fragments, consensus sequences were used or PCR primers were generated, that portion of genomic DNA was then amplified and sequenced to resolve ambiguous sequences.

[0144] BLAST analysis of the htgs phase 1 or phase 2 human genomic DNA sequences encoding MS4A cDNAs and the assembled and annotated human genomic sequence thereof, as disclosed herein, revealed the presence of each known human MS4A family member. In addition, three putative genes encoding unique MS4A family members were identified that localized to the q12-13.1 region of human chromosome 11. Complete coding regions were predicted using overlapping nucleotide sequences obtained from sequenced ESTs and cDNAs and by comparison of gene structure, described further herein below (FIG. 2).

[0145] By identifying sequences that correlated with different MS4A genes in each BAC (Table 1), and by the assembly of minimal genomic DNA lengths that could encode each MS4A gene (FIG. 2), we used the overlapping BACs to identify the order of the MS4A genes on chromosome 11q12 (FIG. 6). This analysis also allowed us to determine the direction of gene transcription for most MS4A genes. Furthermore, the MS4A cDNA sequences, disclosed herein, were used to assemble genomic clones set forth as SEQ ID NOs:73-81. In some cases, multiple MS4A genes could be aligned within a continuous genomic sequence. For example, the genomic sequence set forth as SEQ ID NO:77 comprises both the MS4A4E and MS4A6A genes. Similarly, the genomic region set forth as SEQ ID NO:79 comprises three MS4A genes: MS4A7, MS4A5, and MS4A12.

[0146] The MS4A4E gene encodes 660 bp of translated sequence (FIG. 3), contained within at least seven exons (FIG. 2). Exons were identified based on their sequence similarities with MS4A4A sequences and the identification of canonical splice-donor and -acceptor sites (Aebi & Weissmann, 1987). The MS4A4E gene sequence was at least 23,379 base pairs in length, if counted from the putative translation initiation ATG site until the TGA translation termination stop site (FIG. 2). An exon encoding the putative 5′ untranslated region of MS4A4E, was highly homologous with the corresponding sequence in MS4A4A cDNAs (disclosed herein). This sequence homology extended for >7 kbp upstream from this putative exon and also included upstream repetitive Alu elements. Representative upstream homologous sequences are shown in FIG. 3. Similar sequence homologies were identified in the 3′ untranslated regions of MS4A4E and MS4A4A, which extended beyond the poly-A attachment signal sequences (FIG. 3). Based on the sequence similarities in translated and untranslated exons, it appears that the MS4A4E and MS4A4A genes resulted from a recent gene duplication event.

[0147] The MS4A6E gene encodes 441 bp of translated sequence (FIG. 4), contained within at least four exons (FIG. 2). Exons were identified based on their sequence similarities with MS4A6A cDNA sequences and the identification of canonical splice-donor and -acceptor sites (Aebi & Weissmann, 1987). In addition, the predicted gene sequences matched those found in three cDNA clones that were sequenced (ATCC Nos. 3704466, 1852248 and 3557769). The MS4A6E gene was at least 5,060 bp in length, if counted from the putative translation initiation ATG site until the TGA translation termination codon (FIG. 2). The MS4A6E gene lacks exons that encode the first two membrane spanning domains present in most MS4A family proteins (FIGS. 2 and 7). An exon homologous with the 5′ untranslated region of MS4A6A cDNAs was not identified within 7,629 bp of sequence upstream of the exon encoding the translation initiation site of MS4A6E. However, there was a canonical 3′ splice region upstream of the ATG initiation codon located at identical positions in the MS4A6E and MS4A6A genes. Similar sequence homologies were identified in the 3′ untranslated regions of MS4A6E and MS4A6A that extend beyond the sequence shown in FIG. 4. Based on the sequence similarities in translated and untranslated exons, it appears that the MS4A6E and MS4A6A genes represent a recent gene duplication event, although several exons encoding translated sequence were lost in the MS4A6E gene (FIG. 2).

[0148] The MS4A10 gene encodes 726 bp of translated sequence (FIG. 5), contained within at least six exons (FIG. 2). Exons were identified based on their sequence similarities with mouse MS4A10 cDNA sequences and the identification of canonical splice-donor and -acceptor sites (Aebi & Weissmann, 1987). The MS4A10 gene was at least 8,183 bp in length if counted from the putative translation initiation ATG site until the TGA translation termination stop site (FIG. 2). An exon homologous with the 5′ untranslated region of mouse MS4A10 cDNAs was not identified within 8,829 bp of sequence upstream of the exon encoding the translation initiation site of MS4A10. However, there was a canonical 3′ splice region upstream of the ATG initiation codon located at identical positions in the MS4A10 and MS4A10 genes. Modest sequence homologies were identified in the 3′ untranslated regions of MS4A10 and MS4A10 (FIG. 5).

TABLE 1
Human BACs Containing MS4A Genes

| BAC | Accession No.^{a} | Chromosome | MS4A gene^{b} |
|---|---|---|---|
| RP11-206B10 | AC009703 | 15 | A4A, A4E, A6A |
| RP11-21B14 | AC013807 | unknown | A6A, A2, A3 |
| RP11-24D1 | AC015840 | unknown | A4A, A5, A6E, A7 |
| RP11-652L5 | AC018966 | 11 | A4A, A4E, A6A |
| RP11-448N3 | AC024066 | 11 | A8B |
| RP11-312N17 | AC027599 | 11 | A8B, A10 |
| RP11-196E16 | AC027787 | 15 | A5, A1 |
| CMB9-79B2 | AP000748 | 11q23 | A10 |
| RP11-804A23 | AP000777 | 11 | A10 |
| RP11-736I10 | AP000790 | 11q12 | A3 |
| RP11-804B24 | AP000934 | 11 | A10 |
| RP11-729B4 | AP001034 | 11q12 | A5, A12, A1 |
| CMB9-2M23 | AP001181 | 11q12 | A2, A3 |
| CMB9-100I1 | AP001257 | 11q12 | A6A, A4E |
| CMB9-49F18 | AP001259 | 11 | A8B |
| RP11-68H20 | AP001986 | 11q | A10 |

^{a}GenBank Accession number for the indicated BAC.
^{b}indicates the MS4A gene sequences that mapped to each BAC.

[0149] II.B. MS4A Nomenclature

[0150] In collaboration with the Human Gene Nomenclature Committee (www.gene.ucl.ac.uk/nomenclature/), this gene family was designated as the MS4A family (Membrane Spanning 4-domain family, subfamily A). The MS4 designation is to accommodate the future identification of genes encoding proteins with a similar structure, yet with unresolved functions. Subfamily A will designate the CD20 family. Using this nomenclature, the CD20 gene was designated as MS4A1, FcεRIβ as MS4A2, and HTm4 as MS4A3. Among the 16 novel genes identified, 8 human genes were named MS4A4A, MS4A4E, MS4A5, MS4A6A, MS4A6E, MS4A7, MS4A8B, and MS4A12. A ninth gene encoded a protein homologous with the single member of the mouse MS4A10 subfamily. This gene was tentatively designated as MS4A10. The remaining genes were of mouse or pig origin and were therefore labeled as MS4a3-MS4a12 based on the nomenclature of homologous genes corresponding to human counterparts. Distinct mouse genes that encoded proteins with highly homologous sequences were designated as MS4a4B, MS4a4C, MS4a4D, and as MS4a6B, MS4a6C, and MS4a6D to signify close homology.

[0151] II.C. MS4A Gene Chromosome Locations

[0152] Chromosome locations for the human MS4A4A, MS4A6A, MS4A7, and MS4A8B genes were identified in two distinct homology searches. Regions of human MS4A4A (bp 1286-1588), MS4A6A (bp 682-1106), MS4A7 (bp 502-941), MS4A7 (bp 1015-1177), and MS4A8B (bp 1007-1350), were 98%, 98%, 97%, 99% and 97% identical with human STS genomic sequence tag sites, WI-11578, SHGC-36634, WI-12101, WIAF-3856, and WI-14145, respectively (http://www.ncbi.nim.nih.gov/blast). These genomic sequence tag sites are located on human chromosome 11 at Genomic Database locus D11S1357-D11S913, which maps to 11q12-13 (http://www.ncbi.nlm.nih.gov/genemap). These mapping results were confirmed using the UniGene collection at the National Center for Biotechnology Information (http://www.ncbi.nlm.nih.gov/Genemap98/) for expressed sequence tags identical to human MS4A4A, MS4A6A, MS4A7, MS4A8B sequences. By this analysis, at least 7 of the 9 currently identified human MS4A genes are clustered.

[0153] The organization of the 12 MS4A genes on human chromosome 11 was determined by identifying sequenced human genomic DNA fragments (contigs of different lengths) from 15 BAC clones (Table 1). Contiguous DNA segments for each BAC were constructed based on human MS4A exon and cDNA sequences, and overlapping contigs. Although some gaps were present in MS4A gene introns (FIG. 2) or between MS4A genes, the relative position of each gene on chromosome 11q12-13.1 was determined (FIG. 6). MS4A1 was located in a telemetric region of 11q12-13.1 compared with MS4A2 and MS4A3. Seven MS4A genes were located in between MS4A1 and MS4A2. Two other MS4A genes, MS4A8B and MS4A10 were centromeric to MS4A2 and MS4A3, although the distance between these genes was not determined. Interestingly, MS4A6A, MS4A4E, MS4A4A and MS4A6E were arranged linearly suggesting that these genes might have arisen through the duplication of a single genomic element. It is envisioned that this genetic locus extends further and contains additional MS4A genes.

[0154] II.A. MS4A Gene Structure

[0155] Complete coding region sequences were verified for each deduced protein, except for the MS4a3 cDNA that was not full-length (FIG. 1). Proposed ATG translation initiation codons were based on the translation initiation consensus sequence, ANNATG (Kozak (1986) Cell 44:283-292), and the existence of in-frame upstream translation stop codons in most cases. Whether the first or second ATG codon in mouse MS4a8B was used for translation initiation was unknown although the second ATG was identical with the start codon of human MS4A8B (FIG. 7).

[0156] Poly(A) attachment signal sequences were identified in the proximal 3′ untranslated regions of each gene product except MS4A6A, MS4A6E, MS4A10, and MS4a6C. Two poly(A) signal sequences were found in MS4a4D, MS4A5, and MS4a10 transcripts, while four were observed in MS4A4A transcripts.

[0157] The disclosed MS4A cDNAs were further used to annotate the genomic sequence derived from BAC clones. Annotated features include definition of coding regions, intronlexon junctions, sequences upstream of the initial coding region of each gene that comprise the promoter region, and other adjacent sequences that could also comprise gene regulatory elements. Representative methods for further characterizing a MS4A promoter region are disclosed in Example 9.

[0158] Annotation of human MS4A genomic regions (SEQ ID NOs:73-81), as disclosed herein, enabled a comparison of gene structure among MS4A genes. The overall domain organization of each MS4A gene was similar (FIGS. 2 and 7). All exonlintronlexon boundaries were consistent with consensus splice-donor and -acceptor sequences unless otherwise indicated, with exon|GTGAGT-intron-CAG|exon sequences in most cases (Aebi & Weissmann, 1987). In addition, the splice junctions for all translated exons were located after the third nucleotide in each codon. Most MS4A proteins were encoded by 6 exons except MS4A2, MS4A5, and MS4A6E (FIGS. 2 and 7). In these exceptions: the N-terminal cytoplasmic domain of MS4A2 was encoded by two exons. (Kuster et al., 1992); the MS4A5 and MS4A6E genes did not encode C-terminal cytoplasmic domains; and the MS4A6E gene had only two membrane spanning domains. Intron lengths demonstrated wide variation from 181 bp in MS4A12 to 13,731 bp in MS4A5. In some cases however, exact intron lengths were not determined; MS4A3, MS4A4, and MS4A12 (FIG. 2). Distances between translation initiation and termination codons were determined for most MS4A genes; with MS4A6E being the smallest (5,060 bp) and MS4A4E being the longest (23,379 bp) genes (FIG. 6). Thus, the intronlexon organization of all MS4A family members is consistent with the high degree of conservation within this gene family.

[0159] There were no amino-terminal signal sequences, although all MS4A proteins contained hydrophobic regions of sufficient length to pass through the membrane at least four times. Notable was a marked clustering of charged residues at both ends of the putative transmembrane domains, some of which were highly conserved. In some cases, the first and second putative transmembrane domains of MS4A proteins were a continuous stretch of hydrophobic amino acids without an obvious inter-transmembrane hydrophilic bridge. By contrast, MS4A4A and MS4A7 had 6 to 7 hydrophilic amino acids inserted between the first and second hydrophobic domains. In human MS4A4A and mouse MS4a4B, MS4a4C, and MS4a4D, an extensive hydrophobic region followed the fourth putative membrane-spanning domain. Thus, the overall structure of MS4A family members was well conserved.

[0160] II.E. MS4A Gene Splice Variants

[0161] Among the MS4A cDNAs sequenced and EST sequences analyzed, multiple splice variants were identified that encoded variant MS4A proteins. In most cases, exons were spliced out, which generated truncated protein products. Potential splice variants of the MS4A4A, MS4A5, MS4A6A, and MS4A7 genes were identified. Whether these alternatively spliced variants produce functional proteins has yet to be determined.

[0162] Two splice variations of the MS4A4A gene were identified during an analysis of MS4A4A mRNA expression by lymphoblastoid cell lines. Most of the hematopoietic cell lines examined expressed transcripts encoding a full-length MS4A4A protein as shown in FIG. 7. However, a second smaller transcript was also expressed in most cases that contained a potential exon deletion of 158 nucleotides. This was a frequent event since 40% of MS4A4A cDNAs generated from the BJAB B cell line encoded the truncated protein. In addition, the same splicing event was observed in two of five EST sequences that covered this region of the MS4A4A protein. Splicing-out this potential exon deleted the third membrane-spanning domain and the second extracellular loop from the full-length protein (positions 110-163, FIG. 3). Of interest, this splicing event fused the first/second membrane spanning domains with the fourth membrane spanning domain. However, the fourth transmembrane spanning domain in MS4A4A is followed by another hydrophobic region of sufficient length to traverse the membrane (disclosed herein). This suggests that differential splicing can generate an alternative MS4A4A protein with four membrane spanning domains lacking a significant extracellular domain.

[0163] In the case of the MS4A5 gene, two of nine MS4A5 EST sequences analyzed (GenBank Accession Nos. M411806 and AA781801) encoded a splice variant that preserved the reading frame of the transcript. In both sequences, the exon encoding the third membrane-spanning domain and the second extracellular loop from the full-length protein (TM3, FIG. 1) was spliced out using normal splice-donor and -acceptor sequences, which deleted 51 amino acids (114-164) from the full length protein (FIG. 7). This deletion resulted in a protein with the first/second membrane spanning domains fused with the fourth predicted membrane-spanning domain. Thus, the truncated MS4A5 protein would possess three membrane-spanning domains with an extracellular carboxyl-terminal domain.

[0164] A novel splicing event was observed in the MS4A6A gene which resulted in a truncated protein. A novel splice donor site (CAG T⁶⁸³|GT GAG T) is located within the exon encoding the TM3/extracellular loop domains (FIG. 4). This cryptic splice donor site was spliced with the normal 3′ splice acceptor site of the exon encoding the TM4 domain, which thereby deletes nucleotides 684-787 from MS4A6A transcripts (FIG. 4). Since there was an extra T introduced into the codon sequence due to this alternative splicing event, there was a frameshift in the coding sequence. This potentially results in the attachment of a novel 30 amino acid sequence (—WNSLSDADLHSAGILPSCAHCCMVETGLL) that is not predicted to be hydrophobic. Thus, the variant MS4A protein would be 70 amino acids shorter and would lack the fourth membrane-spanning and cytoplasmic domains. This alternative splicing event was found in 3 of 29 EST sequences that encoded this region (GenBank Accession Nos. A1278475, AA461046, and AA448335) and in one cDNA clone (GenBank Accession No. AB013104).

[0165] Splice variation in MS4A7A transcripts produces two distinct protein products in addition to the presumably normal protein. In one case, a splice variation in MS4A7A transcripts produces a protein product similar in structure to the MS4A6E protein. The exon encoding the first/second membrane spanning domains (amino acids 50-94, FIG. 7) was deleted in 2 of 4 MS4A7 EST sequences analyzed (GenBank Accession Nos. N42191 and R11179) that cover this region. Thus, the protein product would have a longer N-terminal cytoplasmic domain and only two membrane spanning domains. In the second case, the exon encoding the fourth membrane-spanning domain (amino acids 183-216) was deleted in 2 EST sequences (GenBank Accession Nos. R11180 and A1188478) out of 18 sequences analyzed (FIG. 7).

[0166] II.F. MS4A Gene Polymorphisms

[0167] Putative polymorphisms were identified in the MS4A6A gene. Two nucleotide substitutions were found in cDNA clone ATCC No. 499181 and in 13 of 38 EST sequences analyzed (FIG. 1). The first substitution was at nucleotide 373 that exchanged a C for a T, which did not alter the amino acid sequence. The second substitution resulted in a Ser in place of Thr at amino acid 185. In addition, a third substitution was found in 4 of the 38 EST sequences analyzed where a Ser was substituted in place of an Ala at amino acid position 183. This substitution was paired with a Ser to Thr substitution at amino acid position 185 in half of the clones analyzed. These differences most likely represent common sequence polymorphisms since they were observed in multiple independent cDNA clones. Based on our genetic DNA analysis, it is unlikely that these differences could represent transcripts from distinct genes that are almost identical in coding sequence.

[0168] As with the MS4A6A gene (disclosed herein), potential gene polymorphisms were observed in MS4A6E. Three cDNA clones representing partial transcripts were sequenced completely on both strands. The predicted MS4A6E gene product and one cDNA clone (ATCC No. 3704466) had identical sequences. However, the ATCC No. 3557769 cDNA had a nucleotide substitution at position 314 (FIG. 4) that exchanged a T for a C, which did not alter the predicted amino acid sequence. The ATCC No. 1852248 cDNA clone had the longest insert that starts at nucleotide position 60 and ended at position 661 as shown in FIG. 4. This cDNA had a substitution at nucleotide 153 that exchanged a G for a T, which resulted in a Phe in place of Val at amino acid 47 (FIG. 4). Therefore, sequence polymorphisms can exist within the MS4A6E gene.

[0169] Other potential polymorphisms were observed in other MS4A family members based on consistent nucleotide variations found in MS4A4E sequences.

[0170] The assembly and annotation of genomic sequences comprising MS4A genes in the region of human chromosome 11q12-13.1, disclosed herein for the first time, provide source material for identification of polymorphisms that are linked to MS4A genes. Such polymorphisms can include single nucleotide polymorphisms as disclosed within the MS4A6A and MS4A6E coding region sequences. In addition, polymorphisms within or genetically linked to MS4A genes can also comprise restriction length polymorphisms (RFLPs) (Lander & Botstein (1989) Genetics 121:185-199), short tandem repeat polymorphisms (STRPs), short sequence length polymorphisms (SSLPs) (Dietrich et al. (1996) Nature 380:149-152), amplified fragment length polymorphisms (AFLPs) (Latorra et al. (1994) PCR Methods Appl 3(6):351-358), and microsatellite markers (Schalkwyk et al. (1999) Genome Res 9:878-887). Identification of polymorphisms within an isolated DNA molecule are known to one of skill in the art.

[0171] II.G. MS4A Proteins

[0172] The MS4A genes encoded proteins of 16-29 kDa (Table 2).

TABLE 2
MS4A Family Members

| Human | | Mouse | | Human/Mouse |
|---|---|---|---|---|
| Name | kDa | Name | kDa | Homology |
| | | MS4a3 | | 63% (partial) |
| MS4A4A | 23 | | | |
| | | Ms4a4B | 24 | 41% |
| | | Ms4a4C | 24 | 44% |
| | | Ms4a4D | 24 | 40% |
| MS4A4E | 24 | | | |
| MS4A5 | 22 | | | |
| MS4A6A | 27 | | | |
| | | Ms4a6B | 27 | 52% |
| | | Ms4a6C | 24 | 51% |
| | | Ms4a6D | 26 | 53% |
| MS4A6E | 16 | | | |
| MS4A7 | 26 | MS4a7 | 26 | 53% |
| MS4A8B | 26 | MS4a8B | 29 | 63% |
| MS4A10 | 27 | MS4a10 | 29 | 52% |
| MS4A12 | 26 | MS4a12_{(pig)} | 26 | 60% |

^{a}Predicted molecular weights for the new MS4A family members and the percentage amino acid sequence identity between deduced MS4A and MS4a proteins.

[0173] Comparisons between CD20 and the predicted amino acid sequences for human MS4A4A, MS4A5, MS4A6A, MS4A7, MS4A8B, and MS4A12 revealed 23-29% amino acid sequence identity (FIG. 7). The highest degree of identity was found in the first three transmembrane domains with multiple regions of conserved amino acids. In particular, the amino acid sequences LGAXQI (SEQ ID NO:57) and LSLG (SEQ ID NO:58) were common within the first transmembrane domain, GYPFWG (SEQ ID NO:60) and FIISGSLS (SEQ ID NO:61) were common in the second domain, and SLX₂NX₂SX₃AX₂G (SEQ ID NO:62) was found in the third transmembrane domain. The first and second transmembrane domains of MS4A8B were 46% identical in amino acid sequence with human CD20, 41% identical with FcεRIβ, and 39% identical with HTm4. The MS4A4A, MS4A5, MS4A6A, and MS4A7 proteins were most homologous in their first and second transmembrane domains with the human FcεRIβ chain, with 37-46% amino acid sequence identity. There was large variation between MS4A proteins in the N- and C-terminal cytoplasmic domains. However, Pro residues were significantly over-represented within the N- and C-terminal cytoplasmic domains of most MS4A family members. There was some sequence identity in the first potential extracellular loop that was ˜13 amino acids in length for each protein. By contrast, the second predicted extracellular loop ranged from 10-46 amino acids in length with diverse sequences.

[0174] The putative MS4A4E gene encodes a 220 amino acid protein of 23.8 kDa with a predicted amino acid sequence that is 76% identical with the MS4A4A protein (FIG. 3). Consistent with other MS4A proteins, the most significant homologies between MS4A4E and other MS4A family members were found in the membrane spanning domains (FIG. 7). Common amino acid motifs were readily visualized such as KXLGAIQI (SEQ ID NO:57), GYPXWG (SEQ ID NO:60), and SGXLSI (SEQ ID NO:59) in the first and second hydrophobic regions that represent potential transmembrane regions. The intracellular N- and C-terminal domains were highly conserved between MS4A4E and MS4A4A, but were divergent from other family members.

[0175] The putative MS4A6E gene encodes a 147 amino acid protein of 15.9 kDa with a predicted amino acid sequence that is 78% identical with the MS4A6A protein (FIG. 4). The most significant homologies between MS4A6E and other MS4A family members were found in the membrane spanning domains, although MS4A6E only had two (TM3 and TM4) membrane-spanning domains (FIGS. 4 and 7). The putative second extracellular loops of MS4A6E and MS4A6A were of identical length (FIG. 4). Common amino acid motifs were readily visualized in the hydrophobic regions that represent potential transmembrane regions. The intracellular N-terminal domain was highly conserved between MS4A6E and MS4A6A, but were divergent from other family members. MS4A6E protein also lacks a C-terminal cytoplasmic domain (FIG. 4).

[0176] The putative MS4A10 gene encodes a translated 241 amino acid protein of 26.9 kDa with a predicted amino acid sequence that is 52% identical with the mouse MS4A10 protein (FIG. 5). The most significant homologies between MS4A10 and MS4A10 were found in the membrane spanning domains and the putative second extracellular loop (FIG. 5). Although the N-terminal cytoplasmic domains of MS4A10 and MS4A10 were of similar length, the intracellular N- and C-terminal domains had the lowest sequence homologies among domains. The cytoplasmic C-terminal domain was 28 amino acids shorter in MS4A10 than MS4A10. Nonetheless, based on the sequence similarities of translated regions, it appears that MS4A10 and MS4A10 represent homologous genes that are more similar to one another than other MS4A family members.

[0177] Ten novel mouse MS4A proteins were identified that shared 40-63% amino acid sequence identity with their potential human counterparts (FIG. 7, Table 2). For comparison, the mouse and human CD20 proteins are 74% identical in amino acid sequence (Tedder et al., 1988a). A single partial cDNA was identified that encoded the mouse homologue for HTm4 (MS4a3, FIG. 7). The predicted amino terminus of the proposed MS4a3 protein was 23 amino acids shorter than in the human protein, although their overlapping regions were 63% identical in amino acid sequence. In all cases, the transmembrane domains of the human and mouse MS4A proteins were the most well conserved regions. For example, the human MS4A8B protein was 78% identical in sequence to MS4a8B in the first 3 transmembrane domains and 68% identical in domain 4. Additional MS4A genes are likely to be identified in humans and mice, including the mouse MS4A5 homologue.

[0178] A UPGMA (unweighted pair group method using arithmetic averages) tree showing relatedness of deduced MS4A and MS4a protein sequences is depicted in FIG. 8.

[0179] III. Methods for Detecting a MS4A Nucleic Acid Molecule

[0180] In another aspect of the invention, a method is provided for detecting a nucleic acid molecule that encodes a MS4A polypeptide. According to the method, a biological sample having nucleic acid material is procured and hybridized under stringent hybridization conditions to a MS4A nucleic acid molecule of the present invention. Such hybridization enables a nucleic acid molecule of the biological sample and the MS4A nucleic acid molecule to form a detectable duplex structure. Preferably, the MS4A nucleic acid molecule includes some or all nucleotides of any one of the odd-numbered SEQ ID NOs:1-37. Also preferably, the biological sample comprises human nucleic acid material.

[0181] III.A. Expression of MS4A Family Members in Hematopoietic Cells

[0182] Since CD20, FcεRIβ, and HTm4 expression are restricted to hematopoietic tissues, MS4A gene transcription was assessed by PCR amplification of cDNA from eleven human hematopoietic cell lines. Like CD20, MS4A8B was only expressed by B cell lines (Table 3). MS4A5 was only expressed by a promonocytic cell line. MS4A6A transcripts were expressed by B cell, myelomonocytic, and erythroleukemia cell lines. MS4A4A mRNA was expressed by all cell lines examined, although the relative mRNA levels varied significantly. MS4A7 was expressed in most, but not all of the cell lines tested. MS4A12 transcripts were not detected in these cell lines. Thus, most MS4A family members are likely to be expressed in hematopoietic tissues.

[0183] ESTs encoding MS4A transcripts were isolated from a variety of different cDNA libraries. MS4A4A ESTs were from aorta, brain, breast, heart, kidney, lung, ovary, pancreas, placenta, prostate, stomach, testis, and uterine tissues. MS4A5 ESTs were only isolated from testis. MS4A6A ESTs were from aorta, brain, the central nervous system, colon, gall bladder, heart, kidney, lung, muscle, ovary, pancreas, placenta, prostate, skin, stomach, tonsil, uterus and embryonic tissues. MS4A7 ESTs were from lung, kidney, lymphocytes, mammary gland, placenta, spleen, testis, thymus, and uterine tissues. MS4A8B ESTs were from brain, lung, uterus and embryonic tissues. A single MS4A12 EST was isolated from colon. This demonstrates differential MS4A gene transcription among lymphoid and non-lymphoid tissues.

TABLE 3
MS4A mRNA Expression by Human Lymphoblastoid Cell Lines
MS4A family member^{a}

| | | | | | | | | | | G3- |
|---|---|---|---|---|---|---|---|---|---|---|
| Cell lines: | 1 | 2 | 3 | 4A | 5 | 6A | 7 | 8B | 12 | PDH |
| Pre-B: | | | | | | | | | | |
| NALM-6 | − | − | − | +++ | − | − | − | − | − | +++ |
| B cell: | | | | | | | | | | |
| BJAB | +++ | − | − | +++ | − | − | +++ | + | − | +++ |
| DAUDI | +++ | − | − | + | − | − | +++ | + | − | +++ |
| SB | +++ | − | − | ++ | − | +++ | +++ | + | − | +++ |
| T cell: | | | | | | | | | | |
| HSB-2 | − | − | − | + | − | − | − | − | − | +++ |
| HUT-78 | − | − | − | + | − | − | + | − | − | +++ |
| JURKAT | − | − | − | + | − | − | − | − | − | +++ |
| MOLT15 | − | − | − | + | − | − | ++ | − | − | +++ |

Myelomonocyte:

| | | | | | | | | | | |
|---|---|---|---|---|---|---|---|---|---|---|
| HL60 | − | − | +++ | ++ | − | +++ | +++ | − | − | +++ |
| U937 | − | − | +++ | +++ | + | + | +++ | − | − | +++ |

Erythroleukemia:

| K562 | − | + | +++ | +++ | − | + | − | − | − | +++ |
|---|---|---|---|---|---|---|---|---|---|---|
| ^{a}Gene transcription was assessed by PCR amplification of cDNA generated from mRNA isolated from each cell type. Values represent the level of PCR product generated relative to the glyceraldehyde−3−phosphate dehydrogenase (G3PDH) control in three separate PCR reactions: −, no specific PCR product detected; +, low levels of the appropriate band were detectable; ++ to +++, appropriate bands of increasing intensity were readily visualized in all samples | | | | | | | | | | |
| # examined. Identical results were obtained using two different primer pairs for cDNA amplification. | | | | | | | | | | |

[0184] Since most of the MS4A genes are expressed by hematopoietic cells, MS4A4E, MS4A6E and MS4A10 transcription were assessed by RT-PCR amplification of cDNA from human hematopoietic cell lines and human tissues. Transcripts from eleven human hematopoietic cell lines were evaluated; one pre-B cell line (NALM-6), three B cell lines (BJAB, DAUDI, and SB), four T cell lines (HSB-2, HUT-78, JURKAT, and MOLT15), two myelomonocytic lines (HL60 and U937), and one erythroleukemia cell line (K562). In addition, transcripts from eight human tissues were evaluated; colon, ovary, peripheral blood leukocytes, prostate, small intestine, spleen, testes and thymus. However, MS4A4E, MS4A6E and MS4A10 transcripts were not detected in any of these cell lines or tissues.

[0185] MS4A4E, MS4A6E, and MS4A10 sequences were also used to search the translated GenBank databases using the BLAST program (Altschul et al., 1997). Eleven EST sequences representing MS4A6E transcripts were found that represented nine cDNAs isolated from pooled fetal organ libraries (GenBank Accession Nos. AA382998, AA909515, M917066, A1222355, A1279944, A1684553, A1699419, A1743473, A1806247), one cDNA from a pooled germ cell tumor library (GenBank Accession No. A1968835), and one cDNA from a colon tumor (GenBank Accession No. AW951636). EST cDNAs encoding MS4A4E or MS4A10 sequences were not identified. This suggests that MS4A4E, MS4A6E, and MS4A10 transcripts are rare among normal tissues or they are primarily expressed during oncogenesis or embryogenesis.

[0186] MS4a gene expression by mouse tissues was assessed by Northern analysis and PCR amplification of cDNAs (Table 4). In most cases assessed, Northern analysis failed to detect specific MS4a transcripts in tissues that revealed transcript production by PCR amplification. These results suggest that MS4a transcripts are only produced by subpopulations of cells within each tissue such that transcript levels were often below the level of detection by Northern analysis. Nonetheless, MS4a4B, MS4a4C, and MS4a6B transcripts were found at high levels in thymus, spleen and peripheral lymph nodes, with less abundant levels in non-lymphoid tissues. MS4a6C was only expressed by thymus, spleen, PLN and bone marrow. MS4a4C, MS4a6D and MS4a7 were expressed in all tissues examined. MS4a8B transcripts were expressed by spleen, peripheral lymph nodes, colon, liver, heart, lung and bone marrow. MS4A10 transcripts were found in thymus, kidney, colon, brain, and testis. In addition, CD20 (MS4a1), FcεRIβ (MS4a2), and MS4a3 expression were primarily restricted to hematopoietic tissues. MS4a3, MS4a4B, MS4a4C, MS4a6B, MS4a6C, MS4a6D, MS4a7, MS4a8B, and MS4A10 were also expressed by various hematopoietic and lymphoblastoid cell lines. Therefore, most MS4a family members were expressed by hematopoietic cells.

TABLE 4
MS4a Gene Expression by Mouse Tissues^{a}

| MS4a | Thymus | Spleen | PLN | BM | Liver | Kidney | Heart | Colon | Lung | Brain | Testes |
|---|---|---|---|---|---|---|---|---|---|---|---|
| 1 | + | +++ | +++ | + | − | − | − | − | + | − | − |
| 2 | + | + | + | +++ | − | + | − | − | + | − | − |
| 3 | + | + | + | +++ | − | − | − | − | + | + | − |
| 4B | +++ | +++ | +++ | ++ | + | + | + | + | + | − | − |
| 4C | +++ | +++ | +++ | +++ | + | + | + | + | + | + | + |
| 4D | + | + | ++ | − | + | + | ++ | ++ | ++ | − | + |
| 6B | +++ | +++ | +++ | ++ | + | − | + | + | + | − | ++ |
| 6C | + | + | + | ++ | − | − | − | − | − | − | − |
| 6D | +++ | +++ | +++ | ++ | +++ | +++ | +++ | +++ | +++ | +++ | +++ |
| 7 | ++ | ++ | ++ | ++ | + | + | + | ++ | + | + | + |
| 8B | − | + | + | + | + | − | + | ++ | + | − | − |
| 10 | + | − | − | − | − | + | − | + | − | + | ++ |
| G3PDH | +++ | +++ | +++ | +++ | +++ | +++ | +++ | +++ | +++ | +++ | +++ |

^{a}Gene transcription was assessed by PCR amplification of cDNA generated from mRNA isolated from tissue samples. Values represent the level of PCR product generated relative to the glyceraldehyde-3-phosphate dehydrogenase (G3PDH) control as described for Table 3. Peripheral lymph node (PLN) and bone marrow (BM).

[0187] Expression of MS4A family members was also assessed in mouse hematopoietic cell lines (Table 5). Nine of the twelve MS4A genes were expressed in pre-B cell lines and five of the MS4A genes were expressed in B cell lines. Six of the MS4A genes were expressed by T cell lines. These data suggest that B cells can express most members of the MS4A gene family, although the patterns of expression of each gene is distinct.

TABLE 5
MS4a Expression by Mouse Lymphoid Tissues and Cell Lines^{a}

| | Tissues | | Pre B cell lines | | | B cell lines | | T cell lines | |
|---|---|---|---|---|---|---|---|---|---|
| MS4a | Spleen | Thymus | 300.19 | 38B9 | 70Z | A20 | AJ9 | BW514 | EL-14 |
| 1 | +++ | + | − | − | − | +++ | +++ | − | − |
| 2 | + | + | − | − | + | − | − | − | − |
| 3 | + | + | − | + | − | − | − | − | − |
| 4B | +++ | +++ | − | − | − | − | − | − | ++ |
| 4C | +++ | +++ | − | + | + | ++ | − | − | + |
| 4D | + | + | − | − | − | − | − | − | − |
| 6B | +++ | +++ | − | + | +++ | + | − | +++ | +++ |
| 6C | + | − | − | + | + | − | − | − | + |
| 6D | +++ | +++ | − | ++ | +++ | − | + | − | +++ |
| 7 | ++ | ++ | − | − | ++ | − | − | − | − |
| 8B | + | − | − | − | ++ | − | − | − | − |
| 10 | − | + | − | − | + | + | + | + | − |
| G3PDH | +++ | +++ | +++ | +++ | +++ | +++ | +++ | +++ | +++ |
| ^{a}Gene transcription was assessed by PCR amplification of cDNA generated from mRNA isolated from each cell type. Values represent the level of PCR product generated relative to the glyceraldehyde-3-phosphate dehydrogenase (G3PDH) control in three separate PCR reactions: −, no specific PCR product detected; +, low levels of the appropriate band were detectable; ++ to +++, appropriate bands of increasing intensity were readily visualized in all samples examined. | | | | | | | | | |
| # Identical results were obtained using two different primer pairs for cDNA amplification. | | | | | | | | | |

[0188] III.B. Detection of MS4A Polymorphisms

[0189] In another embodiment, genetic assays based on nucleic acid molecules of the present invention can be used to screen for genetic variants by a number of PCR-based techniques, including single-strand conformation polymorphism (SSCP) analysis (Orita, M., et al. (1989) Proc Natl Acad Sci USA 86(8):2766-2770), SSCP/heteroduplex analysis, enzyme mismatch cleavage, and direct sequence analysis of amplified exons (Kestila et al. (1998) Mol Cell 1(4):575-582; Yuan et al. (1999) Hum Mutat 14(5):440-446). Automated methods can also be applied to large-scale characterization of single nucleotide polymorphisms (Brookes (1999) Gene 234(2):177-186; Wang et al. (1998) Science 280(5366):1077-82). The present invention further provides assays to detect a mutation of a variant MS4A locus by methods such as allele-specific hybridization (Stoneking et al. (1991) Am J Hum Genet 48(2):370-82), or restriction analysis of amplified genomic DNA containing the specific mutation.

[0190] IV. Recombinant Production of a MS4A Polypeptide

[0191] The present invention also provides a method for recombinant production of a MS4A polypeptide, as described in Example 3. Preferably, the recombinant polypeptide comprises some or all of the amino acid sequences of any one of the even-numbered SEQ ID NOs:2-38.

[0192] Recombinantly produced proteins are useful for a variety of purposes, including structural determination of a MS4A polypeptide, generation of an antibody that recognizes a MS4A polypeptide, and screening assays to identify a chemical compound or peptide that interacts with a MS4A polypeptide, described further herein below.

V. Production of MS4A Antibodies

[0193] In another aspect, the present invention provides a method of producing an antibody immunoreactive with a MS4A polypeptide, the method comprising recombinantly or synthetically producing a MS4A polypeptide, or portion thereof, to be used as an antigen. The MS4A polypeptide is formulated so that it is can be used as an effective immunogen. An animal is immunized with the formulated MS4A polypeptide, generating an immune response in the animal. The immune response is characterized by the production of antibodies that can be collected from the blood serum of the animal. Optionally, cells producing a MS4A antibody can be fused with myeloma cells, whereby a monoclonal antibody can be selected. Exemplary methods for producing a monoclonal antibody that recognizes a MS4A protein are described in Example 4. Preferred embodiments of the method use a polypeptide set forth as any one of the even-numbered SEQ ID NOs:2-38.

[0194] The present invention also encompasses antibodies and cell lines that produce monoclonal antibodies as described herein.

[0195] The foregoing antibodies can be used in methods known in the art relating to the localization and activity of the MS4A polypeptide sequences of the invention, e.g., for cloning of MS4A nucleic acids, immunopurification of MS4A polypeptides, imaging MS4A polypeptides in a biological sample, measuring levels thereof in appropriate biological samples, and in diagnostic methods.

VI. Methods for Detecting a MS4A Polypeptide

[0196] In another aspect of the invention, a method is provided for detecting a level of MS4A polypeptide using an antibody that specifically recognizes a MS4A polypeptide, or portion thereof. In a preferred embodiment, biological samples from an experimental subject and a control subject are obtained, and MS4A polypeptide is detected in each sample by immunochemical reaction with the MS4A antibody. More preferably, the antibody recognizes amino acids of any one of the even-numbered SEQ ID NOs:2-38, and is prepared according to a method of the present invention for producing such an antibody.

[0197] In one embodiment, a MS4A antibody is used to screen a biological sample for the presence of a MS4A polypeptide. A biological sample to be screened can be a biological fluid such as extracellular or intracellular fluid, or a cell or tissue extract or homogenate. A biological sample can also be an isolated cell (e.g., in culture) or a collection of cells such as in a tissue sample or histology sample. A tissue sample can be suspended in a liquid medium or fixed onto a solid support such as a microscope slide. In accordance with a screening assay method, a biological sample is exposed to an antibody immunoreactive with a MS4A polypeptide whose presence is being assayed, and the formation of antibody-polypeptide complexes is detected. Techniques for detecting such antibody-antigen conjugates or complexes are well known in the art and include but are not limited to centrifugation, affinity chromatography and the like, and binding of a labeled secondary antibody to the antibody-candidate receptor complex.

[0198] In one embodiment, an antibody that specifically recognizes a MS4A polypeptide can be used to assess the tissue- or cell-distribution of MS4A protein, for example, to evaluate CD20 expression during B lymphocyte development (FIG. 9). CD20 expression in B220+lymphocytes from lymphoid tissues of wild type mice was examined by two-color immunofluorescence. In bone marrow, three types of B220⁺ cells were detected. The vast majority of B220^{hi} lymphocytes expressed CD20. However, the majority of B220^{lo} lymphocytes were CD20-negative. Thus, CD20 was predominantly expressed by mature B cells.

[0199] CD19 expression is restricted to normal and neoplastic B cells and follicular dendritic cells. CD19 is expressed early by B progenitor cells in the bone marrow, presumably at the late pro-B or early pre-B cell stages around the time of immunoglobulin heavy chain rearrangement (Anderson et al. (1984) Blood 63:1424). Expression persists during all stages of B cell maturation and is lost upon terminal differentiation to plasma cells.

[0200] Double staining of CD20 with IgM and CD19 antibodies showed that some of the CD19^{lo} and IgM^{lo} cells were CD20 negative in the bone marrow. A few IgM- cells also expressed low levels of CD20 in the bone marrow. This data suggested that the CD20 expression was later than the CD19 expression but before or around the time of IgM expression during B cell development in the bone marrow since these cells were gated on lymphocytes not dendritic cells.

[0201] The level of CD20 expression observed on mature B220^{hi} B cells in bone marrow was maintained by B cells from peripheral lymphoid tissues. The vast majority of B220⁺ B cells in the spleen, blood, peripheral lymph nodes, and peritoneal cavity expressed CD20. Therefore, like human CD20, mouse CD20 was also exclusively expressed on B cells from the immature B cell stage to mature B cells.

VII. Identification of MS4A Modulators

[0202] VII.A. Screening for Small Molecule Ligands that Interact with a MS4A Polypeptide

[0203] The present invention further discloses a method for identifying a compound that modulates MS4A function. According to the method, a MS4A polypeptide is exposed to a plurality of compounds, and binding of a compound to the isolated MS4A polypeptide is assayed. A compound is selected that demonstrates specific binding to the isolated MS4A polypeptide. Preferably, the MS4A polypeptide used in the binding assay of the method includes some or all amino acids of any one of the even-numbered SEQ ID NOs:2-38.

[0204] Several techniques can be used to detect interactions between a protein and a chemical ligand without employing an in vivo ligand. Representative methods include, but are not limited to, Fluorescence Correlation Spectroscopy, Surface-Enhanced Laser Desorption/Ionization Time-Of-flight Spectroscopy, and Biacore technology, as described in Example 5. These methods are amenable to automated, high-throughput screening.

[0205] Candidate regulators include but are not limited to proteins, peptides, and chemical compounds. Structural analysis of these selectants can provide information about ligand-target molecule interactions that enable the development of pharmaceuticals based on these lead structures.

[0206] Similarly, the knowledge of the structure a native MS4A polypeptide provides an approach for rational drug design. The structure of a MS4A polypeptide can be determined by X-ray crystallography or by computational algorithms that generate three-dimensional representations. See Huang et al. (2000) Pac Symp Biocomput 23041; Saqi et al. (1999) Bioinformatics 15:521-522. Computer models can further predict binding of a protein structure to various substrate molecules, that can be synthesized and tested. Additional drug design techniques are described in U.S. Pat. Nos. 5,834,228 and 5,872,011.

[0207] VII.B. Methods for Identifying Modulators of MS4A Gene Expression

[0208] The assembly and annotation of genomic sequences comprising MS4A genes in the region of human chromosome 11q12-13.1, disclosed herein for the first time, identify MS4A gene regulatory regions. Preferably, MS4A gene regulatory regions comprise sequences upstream of the initial coding region of each MS4A gene as disclosed in SEQ ID NOs:73-81. An expression cassette comprising a MS4A promoter region can be employed in assays for the identification of modulators of MS4A expression. Thus the present invention also provides a method for identifying a substance that regulates MS4A gene expression using a chimeric gene that includes an isolated MS4A gene promoter region operably linked to a reporter gene. According to this method, a gene expression system is established that includes the chimeric gene and components required for gene transcription and translation so that reporter gene expression is assayable. To select a substance that regulates MS4A gene expression, the method further provides the steps of using the gene expression system to determine a baseline level of reporter gene expression in the absence of a candidate regulator; providing one or more candidate regulators to the gene expression system; and assaying a level of reporter gene expression in the presence of a candidate regulator. A candidate regulator is selected whose presence results in an altered level of reporter gene expression when compared to the baseline level.

[0209] Several molecular cloning strategies can be used to identify substances that specifically bind a MS4A gene cis-regulatory element. In one embodiment, a cDNA library in an expression vector, such as the lambda-gt11 vector, can be screened for cDNA clones that encode a MS4A gene regulatory element DNA-binding activity by probing the library with a labeled MS4A DNA fragment, or synthetic oligonucleotide (Singh et al. (1989) Biotechniques 7:252-261). Preferably, the nucleotide sequence selected as a probe has already been demonstrated as a protein binding site using a protein-DNA binding assay, as described in Example 9.

[0210] In another embodiment, transcriptional regulatory proteins are identified using the yeast one-hybrid system (Luo et al. (1996) Biotechniques 20(4):564-568; Vidal et al. (1996) Proc Natl Acad Sci USA 93(19):10315-10320; Li & Herskowitz (1993) Science 262:1870-1874). In this case, a cis-regulatory element of a MS4A gene is operably fused as an upstream activating sequence (UAS) to one, or typically more, yeast reporter genes such as the lacZ gene, the URA3 gene, the LEU2 gene, the HIS3 gene, or the LYS2 gene, and the reporter gene fusion construct(s) is inserted into an appropriate yeast host strain. It is expected that the reporter genes are not transcriptionally active in the engineered yeast host strain, for lack of a transcriptional activator protein to bind the UAS derived from the MS4A gene promoter region. The engineered yeast host strain is transformed with a library of cDNAs inserted in a yeast activation domain fusion protein expression vector, e.g. pGAD, where the coding regions of the cDNA inserts are fused to a functional yeast activation domain coding segment, such as those derived from the GAL4 or VP16 activators. Transformed yeast cells that acquire a cDNA encoding a protein that binds a cis-regulatory element of a MS4A gene can be identified based on the concerted activation the reporter genes, either by genetic selection for prototrophy (e.g. LEU2, HIS3, or LYS2 reporters) or by screening with chromogenic substrates (e.g., a lacZ reporter) by methods known in the art.

[0211] The present invention also provides an in vivo assay for discovery of modulators of MS4A gene expression. In this case, a transgenic non-human animal is made such that a transgene comprising a MS4A gene promoter and a reporter gene is expressed and a level of reporter gene expression is assayable. Such transgenic animals can be used for the identification of compounds that are effective in modulating MS4A gene expression. In vitro or in vivo screening approaches can also survey more than one modulatable transcriptional regulatory sequence simultaneously.

VIII. Animal Models

[0212] The present invention further pertains to an animal model of disorders associated with a MS4A nucleic acid or polypeptide, including but not limited to atopic disorders, abnormal target cell development, function, and Ca⁺⁺ responses. Such a model can be prepared by several methods. Using a transgenic approach, knock-out, knock-in, or knock-down mutation of the MS4A gene can suppress MS4A function. The present invention also teaches that an animal model of a MS4A-related disorder can be prepared by immunizing an animal with a MS4A polypeptide. The resulting immune response in the animal comprises a production of antibodies that specifically bind a MS4A polypeptide, thereby disrupting its biological activity. A method is also provided for generating an animal model of a MS4A-related disorder by administering to an animal a compound that disrupts MS4A expression or function. Such a compound is discovered by methods disclosed herein.

[0213] VIII.A. Generation of CD20-Deficient Mice

[0214] CD20-deficient mice were generated by targeted disruption of the CD20 gene in embryonic stem (ES) cells using homologous recombination, as described in Example 6. A targeting vector was generated that replaces exons encoding part of the second extracellular loop, the 4^{th} transmembrane domain, and the large carboxyl-terminal cytoplasmic domain of CD20 with a neomycin resistant gene (FIG. 10A-D). Appropriate gene targeting generates an aberrant CD20 protein truncated at amino acid position 157 and fused with an 88 amino acid protein encoded by the Neo^{r} gene promoter sequence.

[0215] After DNA transfections, 6 of 115 Neo-resistant ES cell clones carried the targeted allele as determined by Southern blot analysis of EcoR V digested genomic DNA using a 1.5 kb DNA probe (FIG. 10D). Appropriate targeting was further verified in two clones by Southern analysis of ES cell DNA digested with BamH I (>12 kb fragment was reduced to a 6.5 kb band in targeted cells), Kpn I (7.2 kb became 5.5 kb), and Ssp I (5.6 kb became 7.0 kb) using the same probe. Cells of one ES cell clone were injected into blastocysts that were transferred into foster mothers. Highly chimeric male offspring (80-100% according to coat color) bred with C57BL/6 (B6) females transmitted the mutation to their progeny (FIG. 10E). Mice homozygous for disruption of the CD20 gene were obtained at the expected Mendelian frequency by crossing heterozygous offspring.

[0216] Appropriate targeting of the CD20 gene was further verified by PCR analysis of genomic DNA from homozygous offspring (FIG. 10F). Wild type CD20 mRNA was absent in CD20^{-/-} mice as confirmed by PCR amplification of cDNA generated from splenocytes of CD20^{-/-} mice (FIG. 10G). CD20-deficient mice (CD20^{-/-}) thrived and reproduced as well as their wild type littermates and did not present any obvious anatomical or morphological abnormalities during the first year of life.

[0217] Absence of cell surface CD20 protein expression in CD20^{-/-} mice was further verified by staining B220⁺ splenocytes with murine anti-CD20 monoclonal antibodies. Hybridomas producing these antibodies were generated using splenocytes from CD20^{-/-} mice that were immunized with CD20-GFP cDNA-transfected 300.19 cells. Ten hybridomas secreted antibodies reactive with 300.19 (FIG. 10H) and CHO (FIG. 101) cells transfected with CD20-GFP cDNA, but not with untransfected CHO or 300.19 cells (Table 6). These antibodies also reacted with CD20 epitopes expressed on the cell surface of B220⁺ splenocytes from wild type mice, but not with splenocytes from CD20^{-/-} mice (FIG. 10J). Therefore, targeted mutation of the CD20 gene abrogated cell surface CD20 protein expression.

TABLE 6
Anti-CD20 Monoclonal Antibodies Generated in CD20^{-/-} Mice^{a}

| | | | Whole Cell ELISA^{a} | | FACS Analysis^{b} | | |
|---|---|---|---|---|---|---|---|
| Ab Name | Clone Name | Isotype | CD20-CHO | CHO | CD20-300.19 | 300.19 | Spleen |
| MB20-1 | MCD20-5 | IgG1, K | + | − | + | − | + |
| MB20-2 | MCD20-61 | IgG1, K | + | − | + | − | ++ |
| MB20-3 | MCD20-86 | IgG3, K | + | − | + | − | ++ |
| MB20-6 | MCD20-223 | IgG2a, K | + | − | + | − | + |
| MB20-7 | MCD20-243 | IgG2b, K | + | − | + | − | + |
| MB20-8 | MCD20-270 | IgG2b, K | + | − | + | − | + |
| MB20-10 | MCD20-388 | IgG2b, K | + | − | + | − | + |
| MB20-11 | MCD20-392 | IgG2a, K | + | − | + | − | + |
| MB20-13 | MCD20-624 | IgG3, K | + | − | + | − | ++ |
| MB20-14 | MCD20-642 | IgG1, K | + | − | + | − | ++ |

^{a}Values represent reactivity of the monoclonal antibody with adherent monolayers of CHO cells either transfected or untransfected with CD20-GFP cDNA as assessed by a cell-based ELISA. The monoclonal antibodies did not react with GFP cDNA-transfected CHO cells.
^{b}Cell surface reactivity of the monoclonal antibody with single cell suspensions of 300.19 cells either transfected or untransfected with CD20-GFP cDNA or spleen cells from wild type mice. Values represent relative indirect immunofluorescence staining intensity as assessed by flow cytometry and shown in figure 10H-J.

[0218] VIII.B. B Cell Development and Function in CD20^{-/-} Mice

[0219] CD20^{-/-} mice did not show an obvious propensity for infections during their first year of life. They had normal frequencies of IgM⁻ B220^{lo} pro/pre-B cells, IgM⁺ B220^{lo} immature B cells and IgM⁺ B220^{hi} mature B cells in the bone marrow (FIG. 11, Table 7). Overall, the number of circulating and spleen IgM⁺ B220⁺ B cells found in CD20^{-/-} mice was increased compared with wild type littermates (Table 7). However, an immunohistochemical analysis of spleen tissue sections revealed a normal architecture and organization of the spleen. In the bone marrow, overall IgM expression was decreased on immature B cells, yet increased on mature B cells when compared with IgM levels expressed by comparable cells in wild type littermates. However, overall IgM expression by mature B220^{hi} B cells in the blood, spleen and lymph nodes was slightly lower in CD20^{-/-} mice (FIG. 11B-D). There were no obvious differences in the size (light scatter properties) of CD20^{-/-} B cells isolated from bone marrow, blood, lymph nodes or spleen when compared with B cells from wild type littermates. These data therefore suggest that CD20 plays a functional role in the development and tissue localization of B cells.

TABLE 7
Frequencies and Numbers of B Lymphocytes in CD20^{-/-} Mice

| | | % of B Lymphocytes | | B cell numbers (×10⁻⁶)^{b} | |
|---|---|---|---|---|---|
| Tissue | Phenotype | Wild Type | CD20^{-/-} | Wild Type | CD20^{-/-} |
| Bone Marrow | B220^{lo}IgM⁻ | 36 ± 2 | 34 ± 3 | | |
| | B220^{lo}IgM⁺ | 19 ± 2 | 13 ± 2* | | |
| | B220^{hi}IgM⁺ | 14 ± 2 | 16 ± 4 | | |
| Blood^{d} | B220⁺IgM⁺ | 61 ± 2 | 60 ± 3 | 3.6 ± 0.5 | 3.9 ± 0.5 |
| Spleen | B220⁺IgM⁺ | 51 ± 6 | 53 ± 5 | 58 ± 12 | 76 ± 7 |
| Lymph Nodes^{e} | B220⁺IgM⁺ | 26 ± 6 | 19 ± 2 | 1.2 ± 0.3 | 0.9 ± 0.1 |
| Peritoneum | B220⁺IgM⁺ | 70 ± 4 | 69 ± 5 | 2.4 ± 0.3 | 3.1 ± 0.4 |
| | B220^{lo}CD5⁺ | 44 ± 4 | 15 ± 5** | 1.5 ± 0.2 | 0.7 ± 0.2** |
| | B220^{hi}CD5⁻ | 28 ± 2 | 59 ± 3** | 1.0 ± 0.1 | 2.7 ± 0.4** |

^{a}Values represent mean (± SEM) results obtained from seven 2-month-old of wild type controls and 10 CD20^{-/-} mice. Numbers represent the percentage of lymphocytes (based on side and forward light scatter properties) expressing the indicated cell surface markers.
^{b}B cell numbers were calculated based on the total number of cells harvested from the indicated tissues.
^{d}The values indicate the number of cells/ml.
^{e}Values represent results from peripheral lymph nodes pairs.
*The percentage or number was significantly different than in wild-type, p < 0.05; ** p < 0.01.

[0220] Within the peritoneal cavity, the number of IgM⁺ B220⁺ B cells in CD20^{-/-} mice was similar to that of wild-type littermates (Table 7, FIG. 11E). However, there was a 4-fold decrease in the number of CD5⁺ B220^{lo} B1a cells, with a compensatory increase in the number of CD5⁺ B220^{hi} B2 cells. Therefore, CD20-deficiency predominantly affected the development or clonal expansion of the B1 subpopulation of B cells within the peritoneal cavity. Exemplary methods for quantitating B cell populations are described in Example 7.

[0221] VIII.C. Reduced [Ca⁺⁺]i Responses in CD20^{-/-} B Cells

[0222] The loss of CD20 significantly altered early B cell signaling responses, measured as described in Example 8. Splenic B220+B cells from CD20^{-/-} mice generated substantially reduced [Ca⁺⁺]i responses following surface IgM ligation when compared with wild type B cells. Decreased [Ca⁺⁺]i responses in CD20^{-/-} B cells were observed in response to both optimal (40 μg/ml, FIG. 12A) and suboptimal concentrations (5 μg/ml) of anti-IgM antibodies. Although the kinetics of [Ca⁺⁺]i responses in CD20^{-/-} B cells was not altered, the magnitude of both the immediate [Ca⁺⁺]i increase and the sustained increase observed at later time points were inhibited by loss of CD20 expression. More dramatic decreases in [Ca⁺⁺]i responses (>50%) by CD20^{-/-} B cells were observed in response to CD19 ligation with optimal concentrations (40 μg/ml) of antibody (FIG. 12A). Reduced [Ca⁺⁺]i responses following CD19 ligation on CD20^{-/-} B cells were likely to result from differences in signaling capacity since Thapsigargin-induced (FIG. 12A) and Ionomycin-induced [Ca⁺⁺]i responses were higher in CD20^{-/-} B cells than in wild type B cells. In addition, CD19 expression levels were not significantly different between CD20^{-/-} and wild type B cells (FIG. 12A).

[0223] Chelation of extracellular calcium with EGTA reduced the kinetics and magnitude of the immediate [Ca⁺⁺]i increase observed following IgM crosslinking (FIG. 12A). However, the [Ca⁺⁺]i increase observed at later time points was not substantially inhibited by EGTA treatment. Similar results were observed in CD20^{-/-} B cells. By contrast, chelation of extracellular calcium with EGTA almost eliminated the [Ca⁺⁺]i response observed following CD19 crosslinking (FIG. 12A). This suggests that transmembrane Ca⁺⁺ flux contributes substantially to the [Ca⁺⁺]i responses observed following CD19 crosslinking. That CD20-deficiency had a substantial effect on CD19-induced [Ca⁺⁺]i responses suggests that CD20 can contribute significantly to transmembrane Ca⁺⁺ flux.

[0224] The consequences of CD20 loss on transmembrane signal transduction was further evaluated by assessing total cellular protein tyrosine phosphorylation in purified B cells following IgM ligation. Although some variation was observed between B cells from individual mice in individual experiments, overall levels of tyrosine phosphorylation in resting splenic B cells were higher in CD20^{-/-} B cells than in wild type mice (FIG. 12C). In addition, protein phosphorylation in B cells from CD20^{-/-} mice increased more significantly after B cell antigen receptor (BCR) ligation than in wild type B cells. Thus, while CD20 expression can influence BCR-induced tyrosine phosphorylation, decreased [Ca⁺⁺]i responses in CD20^{-/-} B cells are unlikely to result from significant abnormalities in transmembrane signaling through the BCR.

IX. Therapeutic Applications

[0225] Another aspect of the present invention is a therapeutic method comprising administering to a subject a substance that modulates MS4A biological activity. Therapeutic substances include but are not limited to chemical compounds, antibodies, and gene therapy vectors. Substances that are discovered by the methods disclosed herein are useful for therapeutic applications related to disorders of MS4A function.

[0226] In one embodiment, the present invention provides a method for disrupting MS4A function by immunizing a subject with an effective dose of the disclosed MS4A polypeptide. The immune system of the subject produces an antibody that specifically recognizes the MS4A polypeptide, and binding of the antibody to the MS4A polypeptide abolishes MS4A function.

[0227] In another embodiment, the present invention provides MS4A nucleic acid sequences and gene therapy methods for modulating MS4A activity in a target cell. The gene therapy vector can encode a MS4A or sequences encoding a nucleic acid molecule, peptide, or protein that interacts with a MS4A protein.

[0228] Vehicles for delivery of a gene therapy vector include but are not limited to a liposome, a cell, and a virus. Preferably, a cell is transformed or transfected with the DNA molecule or is derived from such a transformed or transfected cell. Alternatively, the vehicle is a virus, including a retroviral vector, adenoviral vector or vaccinia virus whose genome has been manipulated in alternative ways so as to render the virus non-pathogenic. Methods for creating such a viral mutation are detailed in U.S. Pat. No. 4,769,331. Exemplary gene therapy methods are also described in U.S. Pat. Nos. 5,279,833; 5,286,634; 5,399,346; 5,646,008; 5,651,964; 5,641,484; and 5,643,567.

[0229] The therapeutic methods of the present invention can be applied in the treatment of a variety of conditions, including in the treatment of non-Hodgkin's lymphoma and in the treatment of atopic disorders or other allergenic diseases. Application of the present inventive therapeutic methods are evidenced by the current U.S. Food and Drug Administration approved use of antibodies against CD20 in the treatment of non-Hodgkin's lymphoma. Additionally, the therapeutic methods of the present invention are illustrated in view of the recognition in the art that genetic variations at chromosome 11Q12-13 can also play a role in the pathogenesis of atopic disorders and other allergenic diseases. Indeed, it has been recognized that FcεRIβ contributes to such diseases, and thus the MS4A genes identified in accordance with the present invention are envisioned also to contribute to allergenic disease. Therefore the present therapeutic methods, which pertain to the modulation of the biological activity of an MS4A polypeptide of the present invention have application with respect to the treatment of such disorders.

X. Summary

[0230] The invention comprises 19 new genes that are members of a class of genes encoding MS4A proteins. Three members have been described, CD20, FcεRIβ, and HTm4. A gene family has been defined based on a shared chromosomal location, conservation of protein size and structure, gene structure conservation, and similar expression in hematopoietic cells. MS4A proteins function as oligomeric cell surface complexes, and complex assembly using diverse MS4A members is implicated as a mechanism for regulating complex function.

[0231] Two members of this class, CD20 and FcεRIβ, have been described functionally, and in each case an important function has been delineated. CD20 is required for cell cycle progression and signal transduction in B lymphocytes. CD20 also regulates Ca⁺⁺ conductance, possibly as a cation channel subunit. Of clinical relevance, antibodies that recognize CD20 are effective in treating non-Hodgkin's lymphoma. FcεRIβ mediates interactions with IgE-bound antigens that lead to degranulation of mast cells, and variation of the FcεRIβ locus is implicated in allergenic disease.

[0232] The utility of the MS4A genes is based in part on overlapping or shared functions with known MS4A members. In one case, new MS4A genes have important potential as part of a CD20 complex. The structural description of CD20 complexes suggests that one or more CD20-related proteins constitute the functional complex. Thus, new MS4A proteins can define antigens useful for lymphoma treatment. In another case, MS4A genes are implicated in IgE responses. Atopic disorders (allergy, asthma, eczema, allergic rhinitis) are dysfunctional IgE responses and are associated with a locus on human chromosome 11q containing most members of the MS4A gene family. FcεRIβ is one relevant factor, and recent work supports that FcεRIβ as well as other genetic elements in the region contribute to the disease. Thus, as disclosed herein, the present MS4A sequences also have utility in the characterization, diagnosis, and potential treatment of atopy linked to the chromosomal location wherein MS4A genes are located.

### EXAMPLES

[0233] The following Examples have been included to illustrate modes of the invention. Certain aspects of the following Examples are described in terms of techniques and procedures found or contemplated by the present co-inventors to work well in the practice of the invention. These Examples illustrate standard laboratory practices of the co-inventors. In light of the present disclosure and the general level of skill in the art, those of skill will appreciate that the following Examples are intended to be exemplary only and that numerous changes, modifications, and alterations can be employed without departing from the scope of the invention.

### Example 1

### Database Searches and cDNA Isolation

[0234] Three hundred and thirty seven nucleotide sequences obtained from the translated GenBank database of expressed sequence tags (ESTs) were assembled into sixty-two subgroups of contiguous linear segments based on their overlapping sequences and potential for encoding proteins homologous with CD20. Based on these subgroups, EST cDNAs (FIG. 1) were obtained from the ATCC and sequenced. Based on the complete sequences of twenty-one near full-length EST cDNAs, eleven novel genes were defined in human and mouse that unified multiple EST subgroups. Near full-length EST clones representing these genes are shown in FIG. 1. These eleven genes and five additional genes were also identified by PCR amplification of transcripts using subgroup-specific primers or primers based on EST sequences. The specific details of how cDNAs representing the five genes that were not identified by EST cDNA clones are indicated below. In all cases, ESTs and cDNAs encoding the predicted coding regions of each putative unique gene were sequenced in both directions and at least two independent ESTs and/or cDNAs representing near full-length gene products were sequenced. Thereby, there was independent confirmation of accuracy for all of the sequences reported.

[0235] Based on EST subgroup sequences, cDNAs encoding mouse MS4a4B and MS4a4C were isolated by PCR amplification of C57BL/6 mouse spleen cDNA using both Taq and Pfu DNA polymerase. Primers for MS4a4B (SEQ ID NOs:63-64) amplified an 879 bp fragment. Primers for MS4a4C (SEQ ID NOs:65-66) amplified a 794 bp fragment. EST sequences for MS4a4D only encoded the 3′ end of the predicted protein. Since MS4a4D sequences were closely related to MS4a4B and MS4a4C sequences, a sense 5′ primer (SEQ ID NO:67) based on consensus MS4a4B and MS4a4C sequences and a MS4a4D-specific antisense primer (SEQ ID NO:68) were used to amplify a 773 bp fragment from cDNA of C57BL/6 mouse lung.

[0236] MS4a6C was initially identified based on one unique EST sequence (AA028258) encoding a mouse protein homologous with the C-terminal end of MS4a6B. MS4a6C cDNAs were isolated by PCR amplification of C57BL/6 mouse bone marrow cDNA using Taq polymerase. A primer based on identical sequences at the 5′ end of the MS4a6B and MS4a6D cDNAs (SEQ ID NO:69) was used in combination with an antisense primer specific for the unique EST sequence (SEQ ID NO:70) to amplify a 787 bp fragment. Sequences from multiple independent PCR-amplified cDNAs were identical. Subsequently, the PCR-generated 5′ end of the near full-length MS4a6C cDNA was found to be identical to an orphan EST subgroup sequence that had not been linked with defined 3′ sequences. Thereby, the EST subgroup sequences verified that the PCR-amplified 5′ end of the MS4a6C cDNAs was appropriate. In addition, the overall MS4a6C sequence was similar to the sequence of MS4a6B cDNAs without interruption. Thus, the MS4a6C cDNA united sequences identical to those found in two non-overlapping CD20-homologous EST subgroups. cDNAs encoding a 473 bp fragment of mouse MS4a3 were amplified from cDNA of C57BL/6 bone marrow as described above. Primers (SEQ ID NOs:71-72) were obtained based on a single thymic cDNA EST sequence (GenBank AA940479) where the corresponding cDNA was not available.

[0237] Human MS4A and mouse MS4a cDNA sequences (MS4A1 to MS4A12) (disclosed herein) were used to search the htgs GenBank human genomic database of unfinished human genomic sequences (http://www.ncbi.nlm.nih.gov/blast/) using the BLAST program. Seventeen phase 1 or phase 2 human genomic DNA sequences encoding potential MS4A genes were assembled into groups of contiguous linear segments based on their overlapping sequences. Three EST clones corresponding to partial MS4A6E transcripts were obtained from the ATCC and sequenced completely on both DNA stands.

[0238] All PCR-amplified cDNAs were subcloned and sequenced entirely in both directions. Complete sequencing of at least two distinct PCR-generated cDNAs from both Taq and Pfu enzyme was performed in most cases. Differences between cDNA sequences were only noted when multiple cDNA clones generated by both Taq and Pfu polymerases revealed identical differences. In some cases, cDNAs or EST sequences contained potential intronlexon splice sites that delimited structural domains and aligned with the known intronlexon splice sites of CD20 (Tedder et al. (1989b) J Immunol 142:2560-2568). In these cases, potential introns were flanked by consensus splice donor and/or splice acceptor sequences (Aebi & Weissmann (1987) Trends Genet 3:102-107) or were likely to represent splice variants where exons were deleted.

### Example 2

### RNA Isolation and Reverse Transcription-PCR

[0239] Reverse transcription-PCR amplification (RT-PCR) was as described previously (Zhou & Tedder, 1995) with minor modifications. Total RNA was extracted from 1-2×10⁷ hematopoietic cell lines using a RNeasy Mini Kit (Qiagen, Inc., Chatsworth, Calif.) according to the manufacturer's instructions. Human hematopoietic cell lines included one pre-B cell line (NALM-6), three B cell lines (BJAB, DAUDI, and SB), four T cell lines (HSB-2, HUT-78, JURKAT, and MOLT15), two myelomonocytic lines (HL60 and U937), and one erythroleukemia cell line (K562). RNA concentrations were determined by UV absorbance. Ten μg of total RNA was reverse transcribed. In some cases, cDNA from any of 8 different human tissues (colon, ovary, blood mononuclear cells, prostate, small intestine, spleen, testes, and thymus; from CLONETECH Laboratories, Inc., Palo Alto, Calif.) was analyzed. RT-PCR amplification was performed using gene-specific primers identical with protein coding regions of the predicted MS4A genes during 35 cycles (94° C. for 1 min, 55° C. for 1.5 min, 72° C. for 1.5 min, followed by extension at 72° C. for 5 min). Following amplification, the PCR products were separated on 1% agarose-ethidium bromide gels and photographed. G3PDH, a housekeeping gene, was also amplified to control for sample to sample variation. RNA amplified without reverse transcription was used as a negative control, and was negative in all cases.

### Example 3

### Recombinant Production of MS4A Protein

[0240] For recombinant production of a protein of the invention in a host organism, a nucleotide sequence encoding the protein is inserted into an expression cassette designed for the chosen host and introduced into the host where it is recombinantly produced. The choice of the specific regulatory sequences such as promoter, signal sequence, 5′ and 3′ untranslated sequence, and enhancer appropriate for the chosen host is within the level of ordinary skill in the art. The resultant molecule, containing the individual elements linking in the proper reading frame, is inserted into a vector capable of being transformed into the host cell. Suitable expression vectors and methods for recombinant production of proteins are well known for host organisms such as E. coli, yeast, and insect cells (see, e.g., Lucknow & Summers (1988) Bio/Technol 6:47). Additional suitable expression vectors are baculovirus expression vectors, e.g., those derived from the genome of Autographica californica nuclear polyhedrosis virus (AcMNPV).

[0241] Recombinantly produced proteins are isolated and purified using a variety of standard techniques. The actual techniques used varies depending upon the host organism used, whether the protein is designed for secretion, and other such factors. Such techniques are well known to the skilled artisan. See Ausubel et al. (1994).

### Example 4

### Mouse Anti-Mouse CD20 Monoclonal Antibody Production

[0242] Hybridomas producing CD20-specific mouse monoclonal antibodies were generated by the fusion of NS-1 myeloma cells with spleen cells from a CD20^{-/-} mouse immunized with a cell line expressing a mouse CD20-GFP fusion protein. The CD20-GFP fusion protein was generated by subcloning a fragment of the pmB1-1 cDNA (from 159 to 1050 bp of SEQ ID NO:39) into the PEGFP-N1 vector (Clonetech Laboratories Inc., Palo Alto, Calif.) to generate an open reading frame encoding the entire CD20 protein with GFP fused to the carboxyl-terminal end. The resulting plasmid was linearized with ApaL I and used to transfect 300.19 cells, a mouse pre-B cell line, and Chinese Hamster Ovary (CHO) cells. Transfection was by Lipofectamine following the manufacturer's instructions (Clonetech Laboratories, Inc.). Transfected cells were selected using GENETICIN™ (1 mg/ml, GIBCOBRL) in RPMI 1640 media (Sigma) for 300.19 cells or H-12 nutrient mixture (GIBCOBRL) for CHO cells. Both media were supplemented with 10% FCS, L-glutamine, streptomycin and penicillin. Transfected cells expressing high levels of CD20-GFP were isolated by fluorescence-based cell sorting.

### Example 5

### In Vitro Binding Assays

[0243] Recombinant protein can be obtained, for example, according to the approach described in Example 4 herein above. The protein is immobilized on chips appropriate for ligand binding assays. The protein immobilized on the chip is exposed to sample compound in solution according to methods well known in the art. While the sample compound is in contact with the immobilized protein, measurements capable of detecting protein-ligand interactions are conducted. Measurement techniques include, but are not limited to, SEDLI, Biacore, and FCS, as described above. Compounds found to bind the protein are readily discovered in this approach and are subjected to further characterization.

### Example 6

### Generation of CD20-Deficient Mice

[0244] DNA encoding the CD20 gene was isolated from a phage library prepared from 129/Sv strain mouse DNA (FIG. 10A), mapped with restriction endonucleases, and sequenced to identify intronlexon boundaries (FIG. 10B). The targeting vector was constructed using a pBluescript SK (Stratagene, La Jolla, Calif.)-based targeting vector (p594, provided by Dr. David Milstone, Brigham and Women's Hospital, Boston, Mass.). A DNA fragment starting at the Pst I site in CD20 exon 5 through the EcoR V site in exon 6 (˜1.8 kb) was isolated and blunt end ligated into the targeting vector downstream of the pMC1-HSV thymidine kinase gene and upstream of the neomycin resistance marker obtained from pGK-neo poly A (Stratagene) that contained the PGK promoter and poly A signal sequence. An ˜10 kb DNA fragment beginning at the Kpn I site downstream of exon 8 was also isolated and inserted into the targeting vector downstream of the neomycin resistant gene. The plasmid was linearized using a unique Sal I restriction site proximal to the 3′ end of the CD20 gene insert and used to transfect ES cells.

[0245] ES cells were transfected with linearized plasmid DNA and selected for G418 resistance as described (Keller and Smithies (1989) Proc Natl Acad Sci USA 886:8932). Genomic DNA from individual selected clones was digested with EcoR V and used for Southern blot analysis along with a radiolabeled ˜1.5 kb DNA probe that was external to the targeting vector (FIG. 10D). A 4.6 kb genomic DNA fragment hybridized with the probe in wild type ES cells or a 6.3 kb fragment in appropriately targeted ES cells (FIG. 1E). Genomic DNA generated by BamH I, Ssc I or Kpn I digestion was also analyzed for appropriate targeting. The Southern blot pattern obtained in all cases was consistent with the appropriate predicted mutation indicating that detrimental recombinations did not occur in the vicinity of the desired homologous recombination. Cells from appropriately targeted ES cell clones were injected into 3.5 day old C57BL/6 blastocysts that were transferred into foster mothers. Offspring carrying the mutant CD20 allele were identified by Southern blot analysis of DNA obtained from tail biopsies.

[0246] High chimeric males (80-100% according to color) were bred with C57BL/6 (B6) females to generate heterozygous offspring with germline gene transmission, which were crossed to generate the homozygous CD20^{-/-} and wild type littermates used for this study. In some cases, B6/129F1J (Jackson Laboratory) were used as controls. Results obtained using wild type littermates of CD20^{+/-} mice were similar and were therefore pooled. All mice were between 2-3 months of age when used for this study. Mice were housed in a specific pathogen-free barrier-facility. All studies and procedures were approved by the Animal Care and Use Committee of Duke University.

### Example 7

### Flow Cytometric Analysis of Lymphocyte Subsets

[0247] Single cell suspensions of lymphocytes from the spleen, bone marrow, peripheral lymph nodes, and peritoneal cavity were isolated from CD20^{-/-} and wild type mice and counted using a hemocytometer prior to two-color immunofluorescence analysis. Retroorbital venous plexus puncture was utilized to obtain circulating leukocytes. Leukocytes (0.5×10⁶) were stained at 4° C. using predetermined optimal concentrations of the test monoclonal antibody for 20 min as described (Zhou et al. (1994) Mol Cell Biol 14:3884-3894). Blood erythrocytes Were lysed after staining using the Coulter Whole Blood Immuno-Lyse kit as detailed by the manufacturer (Coulter, Inc., Miami, Fla.). Cells were washed and analyzed on a FACScan flow cytometer (Becton Dickinson, San Jose, Calif.).

[0248] Antibodies used in this study included the following: biotin, FITC-conjugated anti-B220 Mab (CD45RA, RA-3, 6B2, provided by Dr. Robert Coffman, DNAXCORP, Palo, Alto, Calif.); PE-conjugated anti-mouse Thy1.2 (Caltag Laboratories, Burlingame, Calif.); B220-PE (Caltag Laboratories, Burlingame, Calif.); biotin-conjugated anti-1-A (BD PharMingen, Franklin Lakes, N.J.); PE or APC-conjugated anti-CD5 (BD PharMingen); PE-conjugated goat anti-mouse IgG3-specific antibody (Southern Biotechnology Associates Inc., Birmingham, Ala.); and biotin-conjugated anti-mouse IgD (Southern Biotechnology Associates Inc., Birmingham, Ala.). FITC or biotin-conjugated goat anti-mouse IgM isotype-specific antibodies (Southern Biotechnology Associates Inc., Birmingham, Ala.) were also used.

[0249] Phycoerythrin-conjugated Streptavidin (Southern Biotechnology Associates Inc., Birmingham, Ala.) was used to reveal biotin-coupled monoclonal antibody staining. The percent positively stained lymphocytes was determined using a FACScan flow cytometer (Becton Dickinson, San Jose, Calif.). Positive and negative populations of cells were determined by using unreactive monoclonal antibody (Caltag Laboratories, Burlingame, Calif.) as controls for background staining. Background levels of staining were delineated using gates positioned to include 98% of the control cells. Ten thousand cells with the forward and side light scatter properties of lymphocytes were analyzed for each sample.

### Example 8

### Intracellular Calcium Measurements

[0250] Changes in lymphocyte [Ca²⁺]ᵢ, levels were monitored by flow cytometry analysis as described (Fujimoto et al. (1999) Immunity 11:191). Single cell suspension of splenocytes were resuspended (1×10⁷/ml) in RPMI 1640 medium containing 5% FBS, 10 mM HEPES and loaded with 1 μM of indo-1-AM for 30 min at 37° C. Splenocytes were then washed and incubated with a predetermined optimal concentration of FITC-conjugated anti-B220 monoclonal antibody for 15 min at room temperature. The splenocytes were washed again and resuspended at 2×10⁶/ml in medium. The fluorescence ratio (405/525 nm) of B220⁺ splenic B cells was monitored by flow cytometry at baseline for 1 min and for 6 min after stimulation with optimal and suboptimal concentrations of goat F(ab′)₂ anti-IgM antibody (5-40 μg/ml), optimal concentrations of anti-mouse CD19 monoclonal antibody (40 μg/ml), Thapsigargin. (1 μg/ml; Sigma), or Ionomycin (2.67 μg/ml; Calbiochem Biosciences, Inc., La Jolla, Calif.). In some cases, EGTA (5 mM final; pH 7.0) was added to the cells, immediately followed by stimulation with the inducing agents described above. Results were plotted as the fluorescence ratio at 20 sec intervals with background fluorescence subtracted. An increase in the fluorescence ratio indicates an increase in [Ca²⁺]ᵢ.

### Example 9

### Characterization of a MS4A Promoter Region

[0251] A preferred in vitro technique for evaluating MS4A promoter function is a transient transfection assay. According to this method, one or more chimeric reporter genes comprising a MS4A promoter region is introduced into a relevant host cell (e.g., a hematopoietic cell), and the resulting level of reporter gene expression is quantitated. Representative methods for making an expression system comprising a promoter region operably linked to a heterologous reporter sequence are disclosed in U.S. Pat. No. 6,087,111.

[0252] To analyze the function of a MS4A promoter region in vivo, transgenic mice bearing a chimeric gene comprising a MS4A promoter region are generated, and a level of reporter gene expression in each mouse is determined.

[0253] Within a candidate promoter region or response element, the presence of regulatory proteins bound to a nucleic acid sequence can be detected using a variety of methods well known to those skilled in the art (Ausubel et al., 1992). Briefly, in vivo footprinting assays demonstrate protection of DNA sequences from chemical and enzymatic modification within living or permeabilized cells. Similarly, in vitro footprinting assays show protection of DNA sequences from chemical or enzymatic modification using protein extracts. Nitrocellulose filter-binding assays and gel electrophoresis mobility shift assays (EMSAs) track the presence of radiolabeled regulatory DNA elements based on provision of candidate transcription factors. Computer analysis programs, for example TFSEARCH version 1.3 (Yutaka Akiyama: “TFSEARCH: Searching Transcription Factor Binding Sites”, http://www.rwcp.or.jp/papia/), can also be used to locate consensus sequences of known cis-regulatory elements within a genomic region.

### REFERENCES

[0254] The publications and other materials listed below and/or set forth in the text above to illuminate the background of the invention, and in particular cases, to provide additional details respecting the practice, are incorporated herein by reference. Materials used herein include but are not limited to the following listed references.
[0255] Adelman et al., (1983) DNA 2:183-193.
[0256] Adra et al. (1994) Proc Natl Acad Sci USA 91:10178-10182.
[0257] Adra et al. (1999) Clin Genet 55:431-437.
[0258] Aebi and Weissmann (1987) Trends Genet 3:102-107.
[0259] Alam & Cook (1990) Anal Biochem 188:245-254.
[0260] Altschul et al. (1990) J Mol Biol 215:403-410.
[0261] Altschul et al. (1997) Nucleic Acids Res 25:3389-3402.
[0262] Anderson et al. (1984) Blood 63:1424.
[0263] Ausubel et al. (1992) Current Protocols in Molecular Biology, John Wylie and Sons, Inc., New York, N.Y.
[0264] Barton (1998) Acta Crystallogr D Biol Crystallogr 54:1139-1146.
[0265] Batzer et al. (1991) Nucleic Acids Res 19:3619-3623.
[0266] Blank et al. (1989) Nature 337:187-189.
[0267] Bodanszky, et al. (1976) Peptide Synthesis, John Wiley and Sons, Second Edition, New York, N.Y.
[0268] Bubien et al. J Cell Biol 121:1121-1132.
[0269] Conner et al. (1983) Proc Natl Acad Sci USA 80:278-282.
[0270] Cubitt et al. (1995) Trends Biochem Sci 20:448-455.
[0271] Dietrich et al. (1996) Nature 380:149-152.
[0272] Dombrowicz et al. (1998) Immunity 8:517-529.
[0273] Einfeld et al. (1988) EMBO J. 7:711-717.
[0274] Fujimoto et al. (1999) Immunity 11:191.
[0275] Furumoto et al. (2000) Biochem Biophys Res Com 273:765-771.
[0276] Glover, ed. (1985) DNA Cloning: A Practical Approach, MRL Press, Ltd., Oxford, United Kingdom.
[0277] Gorman et al. (1996) Immunity 5:241-252.
[0278] Henikoff et al. (2000) Electrophoresis 21(9):1700-1706.
[0279] Henikoff & Henikoff (1989) Proc Natl Acad Sci USA 89:10915.
[0280] Henikoff & Henikoff (2000) Adv Protein Chem 54:73-97.
[0281] Harlow & Lane (1988) Antibodies: A Laboratory Manual, Cold Spring Harbor Laboratory Press, Cold Spring Harbor, N.Y.
[0282] Huang et al. (2000) Pac Symp Biocomput 230-241.
[0283] Hupp et al. (1989) J Immunol 143:3787-3791.
[0284] Hutchens & Yip (1993) Rapid Commun Mass Spectrom 7: 576-580.
[0285] Kanzaki et al. (1997a) J Biol Chem 272:14733-14739.
[0286] Kanzaki et al. (1997b) J Biol Chem 272:4964-4969.
[0287] Kanzaki et al. (1995) J Biol Chem 270:13099-13104.
[0288] Karlin & Altschul (1993) Proc Natl Acad Sci USA 90:5873-87.
[0289] Kinet (1999) Annu Rev Immunol 17:931-972.
[0290] Kinet et al. (1988) Proc Natl Acad Sci USA 85:6483-6487.
[0291] Keller & Smithies (1989) Proc Natl Acad Sci USA 886:8932.
[0292] Kozak (1986) Cell 44:283-292.
[0293] Küster et al. (1992) J Biol Chem 267:12782-12787.
[0294] Kyte et al. (1982) J Mol Biol 157:105.
[0295] Lander & Botstein (1989) Genetics 121:185-199.
[0296] Landgren et al. (1988) Science 241:1007.
[0297] Landgren et al. (1988) Science 242:229-237.
[0298] Latorra et al. (1994) PCR Methods Appl 3(6):351-358.
[0299] Li & Herskowitz (1993) Science 262:1870-1874.
[0300] Liedberg et al. (1983) Sensors Actuators 4:299-304.
[0301] Lin et al. (1996) Cell 85:985-995.
[0302] Luckow & Schutz (1987) Nucleic Acids Res 15:5490.
[0303] Luo et al. (1996) Biotechniques 20(4):564-568.
[0304] Luyckx et al. (1999) Proc Natl Acad Sci USA 96(21):12174-12179.
[0305] Madge et al. (1972) Phys Rev Lett 29:705-708.
[0306] McLaughlin et al. (1998) Oncology 12:1763-1769.
[0307] Maiti et al. (1997) Proc Natl Acad Sci USA, 94:11753-11757.
[0308] Malmquist (1993) Nature 361:186-187.
[0309] Mohan et al. (1999) 1999 103:1685-1695.
[0310] Needleman & Wunsch (1970) J Mol Biol 48:443-453.
[0311] Ohtsuka et al. (1985) J Biol Chem 260:2605-2608.
[0312] Onrust et al. (1989) J Biol Chem 264:15323-15327.
[0313] Pearson & Lipman (1988) Proc Natl Acad Sci USA 85: 2444-2448.
[0314] Postic et al. (1999) J Biol Chem 275(1):305-315.
[0315] Ra et al. (1989) Nature 19:1771-1777.
[0316] Rose & Botstein (1983) Meth Enzymol 101:167-180.
[0317] Rossolini et al. (1994) Mol Cell Probes 8:91-98.
[0318] Saiki et al. (1985) Bio/Technology 3:1008-1012.
[0319] Sambrook et al. eds. (1989) Molecular Cloning A Laboratory Manual, Cold Spring Harbor Laboratory Press, Cold Spring Harbor, N.Y.
[0320] Sauer (1998) Methods 14(4):381-392.
[0321] Saqi et al. (1999) Bioinformatics 15:521-522.
[0322] Schalkwyk et al. (1999) Genome Res 9:878-887.
[0323] Sieghart et al. (1999) Neurochem Int 34:379-385.
[0324] Silhavy et al. (1984) Experiments with Gene Fusions, Cold Spring Harbor Laboratory, Cold Spring Harbor, N.Y.
[0325] Singh et al. (1989) Biotechniques 7:252-261.
[0326] Smith & Waterman (1981) Adv Appl Math 2:482.
[0327] Stamenkovic & Seed (1988) J Exp Med 167:1975-1980.
[0328] Stashenko et al. (1980) J Immunol 125:1678-1685.
[0329] Tedder & Engel (1994) Immunol Today 15:450454.
[0330] Tedder et al. (1988a) J Immunol 141:4388-4394.
[0331] Tedder et al (1988b) Proc Natl Acad Sci USA 85:208-212.
[0332] Tedder et al. (1989a) J Immunol 142:2555-2559.
[0333] Tedder et al. (1989b) J Immunol 142:2560-2568.
[0334] Tijssen (1993) Laboratory Techniques in Biochemistry and Molecular Biology-Hybridization with Nucleic Acid Probes, part I chapter 2, Elsevier, New York, N.Y.
[0335] U.S. Pat. No. 4,196,265
[0336] U.S. Pat. No. 4,554,101
[0337] U.S. Pat. No. 4,736,866
[0338] U.S. Pat. No. 5,162,215
[0339] U.S. Pat. No. 5,234,933
[0340] U.S. Pat. No. 5,260,203
[0341] U.S. Pat. No. 5,326,902
[0342] U.S. Pat. No. 5,489,742
[0343] U.S. Pat. No. 5,550,316
[0344] U.S. Pat. No. 5,573,933
[0345] U.S. Pat. No. 5,614,396
[0346] U.S. Pat. No. 5,625,125
[0347] U.S. Pat. No. 5,648,061
[0348] U.S. Pat. No. 5,741,957
[0349] U.S. Pat. No. 6,087,111
[0350] Vidal et al. (1996) Proc Natl Acad Sci USA 93(19):10315-10320.
[0351] Weiner (1999) Semin Oncol 26:43-51.
[0352] Whiting (1999) Neurochem Int 34:387-390.
[0353] WO 93/25521
[0354] WO 97/47763
[0355] Worrall et al. (1998) Anal Biochem 70:750-756.
[0356] Zhou et al. (1994) Mol Cell Biol 14:3884-3894.
[0357] Zhou & Tedder (1995) Blood 86:3295-3301.
[0358] Zimmer et al. (1993) Peptides, pp. 393-394, ESCOM Science Publishers, B.V.

[0359] It will be understood that various details of the invention can be changed without departing from the scope of the invention. Furthermore, the foregoing description is for the purpose of illustration only, and not for the purpose of limitation—the invention being defined by the claims.

The application's sequence listing, which the Patent Office published only in electronic form, follows.

SEQUENCE LISTING (81 sequences)

SEQ ID NO: 1 - DNA, 1619 bp, Homo sapiens
  cDNA (1)..(1619)
  CDS (144)..(806)
aacattcctgcaaatggtttcaatatatgcagatgtctcgatataggaatgaaattacgtctttggaacaacttaaataagtcaaatatacttggagctttaaaaattaaaaggagagagattcgagcaccttttctgctgccatgacaaccatgcaaggaatggaacaggccatgccaggggctggccctggtgtgccccagctgggaaacatggctgtcatacattcacatctgtggaaaggattgcaagagaagttcttgaagggagaacccaaagtccttggggttgtgcagattctgactgccctgatgagccttagcatgggaataacaatgatgtgtatggcatctaatacttatggaagtaaccctatttccgtgtatatcgggtacacaatttgggggtcagtaatgtttattatttcaggatccttgtcaattgcagcaggaattagaactacaaaaggcctggtccgaggtagtctaggaatgaatatcaccagctctgtactggctgcatcagggatcttaatcaacacatttagcttggcgttttattcattccatcacccttactgtaactactatggcaactcaaataattgtcatgggactatgtccatcttaatgggtctggatggcatggtgctcctcttaagtgtgctggaattctgcattgctgtgtccctctctgcctttggatgtaaagtgctctgttgtacccctggtggggttgtgttaattctgccatcacattctcacatggcagaaacagcatctcccacaccacttaatgaggtttgaggccaccaaaagatcaacagacaaatgctccagaaatctatgctgactgtgacacaagagcctcacatgagaaattaccagtatccaacttcgatactgatagacttgttgatattattattatatgtaatccaattatgaactgtgtgtgtatagagagataataaattcaaaattatgttctcatttttttccctggaactcaataactcatttcactggctctttatcgagagtactagaagttaaattaataaataatgcatttaatgaggcaacagcacttgaaagtttttcattcatcataagaactttatataaaggcattacattggcaaataaggtttggaagcagaagagcaaaaaaaagatattgttaaaatgaggcctccatgcaaaacacatacttccctcccatttatttaactttttttttctcctacctatggggaccaaagtgctttttccttcaggaagtggagatgcatggccatctccccctccctttttccttctcctgcttttctttccccatagaaagtaccttgaagtagcacagtccgtccttgcatgtgcacgagctatcatttgagtaaaagtatacatggagtaaaaatcatattaagcatcagattcaacttatattttctatttcatcttcttcctttcccttctcccaccttctactgggcataattatatcttaatcatatatggaaatgtgcaacatatggtatttgttaaatacgtttgtttttattgcagagcaaaaataaatcaaattagaagcaataaaaaaaaaaaaaaaaaaaa

SEQ ID NO: 2 - protein, 220 aa, Homo sapiens
MTTMQGMEQAMPGAGPGVPQLGNMAVIHSHLWKGLQEKFLKGEPKVLGVVQILTALMSLSMGITMMCMASNTYGSNPISVYIGYTIWGSVMFIISGSLSIAAGIRTTKGLVRGSLGMNITSSVLAASGILINTFSLAFYSFHHPYCNYYGNSNNCHGTMSILMGLDGMVLLLSVLEFCIAVSLSAFGCKVLCCTPGGVVLILPSHSHMAETASPTPLNEV

SEQ ID NO: 3 - DNA, 663 bp, Homo sapiens
  CDS (1)..(663)
atgacaaccatgcaaggaatggaacagaccactccagggcctggccctgatgtgccccagctgggaaacatagatgtcatacattcatatctgtgtaaaggattgcaagagaagttcttcaagaggaaacccaaagtccttggggttgtgcggattctgattgccttgatgagccttagcatgggaataataatgatgtgtgttgcatttagttcttatgaagaacatcccatttttgtgtatgttgcgtacacaatttgggggtcagtgatgtttattatttcagtatccttatcagttgcagcaggaattagaacaacaaaaggtctggttggaggtagtctaggaaagaatatcaccagttcagtcttggctatatcagggatcttaatcaatgcaataagcttgacgttttattcattccgttaccattactgtaaccacgatcagttgtcaagtaattgttacatgactatgtccattttaatgggtacggatggcatggtgctcctcttaagtgtgctggaattctgcattgctgtgtccctctctgcctttggatgtaaagtgctttgttgtagccccagtgagtttgtgctaattacaccatcaaattctcacatggcagaaatagcatctcccacaccacttaagacagtttga

SEQ ID NO: 4 - protein, 220 aa, Homo sapiens
MTTMQGMEQTTPGPGPDVPQLGNIDVIHSYLCKGLQEKFFKRKPKVLGVVRILIALMSLSMGIIMMCVAFSSYEEHPIFVYVAYTIWGSVMFIISVSLSVAAGIRTTKGLVGGSLGKNITSSVLAISGILINAISLTFYSFRYHYCNHDQLSSNCYMTMSILMGTDGMVLLLSVLEFCIAVSLSAFGCKVLCCSPSEFVLITPSNSHMAEIASPTPLKTV

SEQ ID NO: 5 - DNA, 694 bp, Homo sapiens
  cDNA (1)..(694)
  CDS (55)..(657)
ctagactgaagtaccaactaaatcatctcctttcaaattatcaccgacaccatcatggattcaagcaccgcacacagtccggtgtttctggtatttcctccagaaatcactgcttcagaatatgagtccacagaactttcagccacgaccttttcaactcaaagccccttgcaaaaattatttgctagaaaaatgaaaatcttagggactatccagatcctgtttggaattatgaccttttcttttggagttatcttccttttcactttgttaaaaccatatccaaggtttccctttatatttctttcaggatatccattctggggctctgttttgttcattaattctggagccttcctaattgcagtgaaaagaaaaaccacagaaactctgataatattgagccgaataatgaattttcttagtgccctgggagcaatagctggaatcattctcctcacatttggtttcatcctagatcaaaactacatttgtggttattctcaccaaaatagtcagtgtaaggctgttactgtcctgttcttgggaattttgattacattgatgactttcagcattattgaattattcatttctctgcctttctcaattttggggtgccactcagaggattgtgattgtgaacaatgttgttgactagcactgtgagaataaagatgtgttaaaataaaaa

SEQ ID NO: 6 - protein, 200 aa, Homo sapiens
MDSSTAHSPVFLVFPPEITASEYESTELSATTFSTQSPLQKLFARKMKILGTIQILFGIMTFSFGVIFLFTLLKPYPRFPFIFLSGYPFWGSVLFINSGAFLIAVKRKTTETLIILSRIMNFLSALGAIAGIILLTFGFILDQNYICGYSHQNSQCKAVTVLFLGILITLMTFSIIELFISLPFSILGCHSEDCDCEQCC

SEQ ID NO: 7 - DNA, 1152 bp, Homo sapiens
  cDNA (1)..(1152): n is an undetermined nucleotide (dATP, dCTP, dGTP, or dTTP)
  misc_feature (29)..(29): n is a, c, g, or t
  CDS (239)..(985): n is an undetermined nucleotide (dATP, dCTP, dGTP, or dTTP)
ttttactgaccttgctagaagtttacagncacggaagtgcaggaacatttcacaaatctacaatctgtgagtatcacatcctgtatagctgtaaacactggaataaggaagggctgatgactttcagaagatgaaggtaagtagaaaccgttgatgggactgagaaaccagagttaaaacctctttggagcttctgaggactcagctggaaccaacgggcacagttggcaacaccatcatgacatcacaacctgttcccaatgagaccatcatagtgctcccatcaaatgtcatcaacttctcccaagcagagaaacccgaacccaccaaccaggggcaggatagcctgaagaaacatctacacgcagaaattaaagttattgggactatccagatcttgtgtggcatgatggtattgagcttggggatcattttggcatctgcttccttctctccaaattttacccaagtgacttctacactgttgaactctgcttacccattcataggaccctttttttttatcatctctggctctctatcaatcgccacagagaaaaggttaaccaagcttttggtgcatagcagcctggttggaagcattctgagtgctctgtctgccctggtgggtttcattatcctgtctgtcaaacaggccaccttaaatcctgcctcactgcagtgtgagttggacaaaaataatataccaacaagaagttatgtttcttacttttatcatgattcactttataccacggactgctatacagccaaagccagtctggctggaactctctctctgatgctgatttgcactctgctggaattctgcctagctgtgctcactgctgtgctgcggtggaaacaggcttactctgacttccctgggagtgtacttttcctgcctcacagttacattggtaattctggcatgtcctcaaaaatgactcatgactgtggatatgaagaactattgacttcttaagaaaaaagggagaaatattaatcagaaagttgattcttatgataatatggaaaagttaaccattatagaaaagcaaagcttgagtttcctaaatgtaagcttttaaagtaatgaacattaaaaaaaaccattatttcactgtcaaaaaaaaaaaaaaaaaaaaaaaa

SEQ ID NO: 8 - protein, 248 aa, Homo sapiens
MTSQPVPNETIIVLPSNVINFSQAEKPEPTNQGQDSLKKHLHAEIKVIGTIQILCGMMVLSLGIILASASFSPNFTQVTSTLLNSAYPFIGPFFFIISGSLSIATEKRLTKLLVHSSLVGSILSALSALVGFIILSVKQATLNPASLQCELDKNNIPTRSYVSYFYHDSLYTTDCYTAKASLAGTLSLMLICTLLEFCLAVLTAVLRWKQAYSDFPGSVLFLPHSYIGNSGMSSKMTHDCGYEELLTS

SEQ ID NO: 9 - DNA, 930 bp, Homo sapiens
  cDNA (1)..(930)
  CDS (17)..(763)
agttggcaacaccatcatgacatcacaacctgttcccaatgagaccatcatagtgctcccatcaaatgtcatcaacttctcccaagcagagaaacccgaacccaccaaccaggggcaggatagcctgaagaaacatctacacgcagaaatcaaagttattgggactatccagatcttgtgtggcatgatggtattgagcttggggatcattttggcatctgcttccttctctccaaattttacccaagtgacttctacactgttgaactctgcttacccattcataggaccctttttttttatcatctctggctctctatcaatcgccacagagaaaaggttaaccaagcttttggtgcatagcagcctggttggaagcattctgagtgctctgtctgccctggtgggtttcattatcctgtctgtcaaacaggccaccttaaatcctgcctcactgcagtgtgagttggacaaaaataatataccaacaagaagttatgtttcttacttttatcatgattcactttataccacggactgctatacagccaaagccagtctggctggatctctctctctgatgctgatttgcactctgctggaattctgcctagctgtgctcactgctgtgctgcggtggaaacaggcttactctgacttccctgggagtgtacttttcctgcctcacagttacattggtaattctggcatgtcctcaaaaatgactcatgactgtggatatgaagaactattgacttcttaagaaaaaagggagaaatattaatcagaaagttgattcttatgataatatggaaaagttaaccattatagaaaagcaaagcttgagtttcctaaatgtaagcttttaaagtaatgaacattaaaaaaaaccattatttcactgtcaaaaaaaaaaaaaaaaaaaaaaaa

SEQ ID NO: 10 - protein, 248 aa, Homo sapiens [sequence omitted]

SEQ ID NO: 11 - DNA, 661 bp, Homo sapiens
  CDS (15)..(458)
ttggcaacaccattatgacatcacaacctatttccaatgagaccatcataatgctcccatcaaatgtcatcaacttctcccaagcagagaaacccgaacccaccaaccaggggcaggatagcctgaagaaacgtctacaggcaaaagtcaaagttattggggtgcatagcagcctggctggaagcattctgagtgctctgtctgccctggtgggtttcattctcctgtctgtcaacccggctgcattaaatcctgcctcattgcagtgtaagttggacgaaaaggatataccaaccagacttcttctttcttatgattatcattcaccttacaccatggactgccatagagccaaagccagtctggctggaactctgtctctgatgctggtttctactgtgttggagttctgcctagctgtgctcactgctgtgctgcagtggaaacagactgtctgacttccctggttactcatgtcctcaaagacgactcatgatgctggatatgaagaactattgacttcttgggaaaaaacggagaaatattaattggaaagttgatttttatgataatatggaaaacctaaccattataaaaaagcaaacttgagtttcctaaatgtaagcatttaaagtaaatgcatatttgttttaaaaaatta

SEQ ID NO: 12 - protein, 147 aa, Homo sapiens
MTSQPISNETIIMLPSNVINFSQAEKPEPTNQGQDSLKKRLQAKVKVIGVHSSLAGSILSALSALVGFILLSVNPAALNPASLQCKLDEKDIPTRLLLSYDYHSPYTMDCHRAKASLAGTLSLMLVSTVLEFCLAVLTAVLQWKQTV

SEQ ID NO: 13 - DNA, 1228 bp, Homo sapiens
  cDNA (1)..(1228)
  CDS (118)..(840)
agattgttctggcaaggaacagccagtgggaggttccagctgagcgctccccagaggtgagctgatccccagccacagcacacaggaccaggctgcgagaacagcatcatcagcatcatgctattacaatcccaaaccatgggggtttctcacagctttacaccaaagggcatcactatccctcaaagagagaaacctggacacatgtaccaaaacgaagattacctgcagaacgggctgccaacagaaaccaccgttcttgggactgtccagatcctgtgttgcctgttgatttcaagtctgggggccatcttggtttttgctccctacccctcccacttcaatccagcaatttccaccactttgatgtctgggtacccatttttaggagctctgtgttttggcattactggatccctctcaattatctctggaaaacaatcaactaagccctttgacctgagcagcttgacctcaaatgcagtgagttctgttactgcaggagcaggcctcttcctccttgctgacagcatggtagccctgaggactgcctctcaacattgtggctcagaaatggattatctatcctcattgccttattcggagtactattatccaatatatgaaatcaaagattgtctcctgaccagtgtcagtttaacaggtgtcctagtggtgatgctcatcttcactgtgctggagctcttattagctgcatacagttctgtcttttggtggaaacagctctactccaacaaccctgggagttcattttcctcgacccagtcacaagatcatatccaacaggtcaaaaagagttcttcacggtcttggatataagtaactcttggcctcagaggaaggaaaagcaactcaacactcatggtcaagtgtgattagactttcctgaaatctctgccattttagatactgtgaaacaaactaaaaaaaaaaaagcttttgttttgtatttgtttactatgagtcgttatttaatttctcttgaaaataatttcctcaaagcccaagtcaataaatgttatcagccagtcttccaaaatggtcataaactttataaactgctttgggtaaactgagcagaaggtgatacacagaagggaaaatgtgcactcatgctagtgtgaatttggtaagtcgcgtgactctgcaggctgtttctgtattattttcacactcatattgcttaaatattacatattagggattg

SEQ ID NO: 14 - protein, 240 aa, Homo sapiens
MLLQSQTMGVSHSFTPKGITIPQREKPGHMYQNEDYLQNGLPTETTVLGTVQILCCLLISSLGAILVFAPYPSHFNPAISTTLMSGYPFLGALCFGITGSLSIISGKQSTKPFDLSSLTSNAVSSVTAGAGLFLLADSMVALRTASQHCGSEMDYLSSLPYSEYYYPIYEIKDCLLTSVSLTGVLVVMLIFTVLELLLAAYSSVFWWKQLYSNNPGSSFSSTQSQDHIQQVKKSSSRSWI

SEQ ID NO: 15 - DNA, 1369 bp, Homo sapiens
  cDNA (1)..(1369)
  CDS (204)..(956)
aaacaggaaataaatacgaatgaaactgagctctaagcagcatgtaacctggcctgcatccaggaaatagaggacttcggatccttctaaccctaccacccaactggccccagtacattcattctctcaggaaaaaaaacaaggtccccacagcaaagaaaaggaataggatcaagagatacgtggctgctggcagagcaagcatgaattcgatgacttcagcagttccggtggccaattctgtgttggtggtggcaccccacaatggttatcctgtgaccccaggaattatgtctcacgtgcccctgtatccaaacagccagccgcaagtccacctagttcctgggaacccacctagtttggtgtcgaatgtgaatgggcagcctgtgcagaaagctctgaaagaaggcaaaaccttgggggccatccagatcatcattggcctggctcacatcggcctcggctccatcatggcgacggttctcgtaggggaatacctgtctatttcattctacggaggctttcccttctggggaggcttgtggtttatcatttcaggatctctctccgtggcagcagaaaatcagccatattcttattgcctgctgtctggcagtttgggcttgaacatcgtcagtgcaatctgctctgcagttggagtcatactcttcatcacagatctaagtattccccacccatatgcctaccccgactattatccttacgcctggggtgtgaaccctggaatggcgatttctggcgtgctgctggtcttctgcctcctggagtttggcatcgcatgcgcatcttcccactttggctgccagttggtctgctgtcaatcaagcaatgtgagtgtcatctatccaaacatctatgcagcaaacccagtgatcaccccagaaccggtgacctcaccaccaagttattccagtgagatccaagcaaataagtaaggctacagattctggaagcatctttcactgggaccaaaagaagtcctcctccctttctgggcttccataacccaggtcgttcctgttctgacagctgaggaaacgtctctcccactgtttgtactctcaccttcattcttcaattcagtctaggaaaccatgctgtttctctatcaagaagaagacagagattttaaacagatgttaaccaagagggactccctagggcacatgcatcagcacatatgtgggcatccagcctctggggccttggcacacacacattcgtgtgctctgctgcatgtgagcttgtgggttagaggaacaaatatctagacattcaatcttcactctttcaattgtgcattcatttaataaatagatactgagcattcaaaaaaaaaaaaaaaaaa

SEQ ID NO: 16 - protein, 250 aa, Homo sapiens
MNSMTSAVPVANSVLVVAPHNGYPVTPGIMSHVPLYPNSQPQVHLVPGNPPSLVSNVNGQPVQKALKEGKTLGAIQIIIGLAHIGLGSIMATVLVGEYLSISFYGGFPFWGGLWFIISGSLSVAAENQPYSYCLLSGSLGLNIVSAICSAVGVILFITDLSIPHPYAYPDYYPYAWGVNPGMAISGVLLVFCLLEFGIACASSHFGCQLVCCQSSNVSVIYPNIYAANPVITPEPVTSPPSYSSEIQANK

SEQ ID NO: 17 - DNA, 726 bp, Homo sapiens
  CDS (1)..(726)
atgaaagcagaagccacagttattcccagccgttgtgctagggggctcccatcatggcaagtcctcagcccagtccagccctggcagacaagtgcaccccagaacacgacccagcccaagctcctggctccacaccagcacgagaagtcccagaagaagagcagccttcttaaggagctgggggccttccacatcaccatcgctctgctgcacctggtctttgggggctacctggcctctatagtcaagaaccttcacctggtggtgctgaagtcttggtatccattctggggggctgcctcttttctcatttcagggatcttggcgataacaatgaagaccttttctaaaacttacctgaagatgttgtgcctgatgacaaacctcatcagcctcttttgcgtgctgtctggcctcttcgtcatctccaaggatctctttctggagagcccatttgagtccccgatctggagaatgtaccccaactccacggtccacatccagaggctggagctggccttgctctgcttcactgtcctagagctcttcctgccagtgcccacagctgtcacagcctggagaggggactgcccatctgcaaagaatgatgatgcatgccttgttccgaatacaccattgcatctcaaaggcctgccggtggagcccccgccatcctaccagagtgtgattcaaggcgacgcacaacacaagcaacatcagaggtga

SEQ ID NO: 18 - protein, 241 aa, Homo sapiens
MKAEATVIPSRCARGLPSWQVLSPVQPWQTSAPQNTTQPKLLAPHQHEKSQKKSSLLKELGAFHITIALLHLVFGGYLASIVKNLHLVVLKSWYPFWGAASFLISGILAITMKTFSKTYLKMLCLMTNLISLFCVLSGLFVISKDLFLESPFESPIWRMYPNSTVHIQRLELALLCFTVLELFLPVPTAVTAWRGDCPSAKNDDACLVPNTPLHLKGLPVEPPPSYQSVIQGDAQHKQHQR

SEQ ID NO: 19 - DNA, 518 bp, Mus musculus
  cDNA (1)..(518)
  CDS (148)..(516)
taagcgctgaggaggaagagactgctggttttgggggacagactctggtggtcattactgtctcctcttctgtaatgagttggacttgcaggggaaggacttgtcaaatcctgaattcttcaaggtggtacctcatcaggcagacacatgaagccagaggagactggtggttctgtttatcagcccttggatgagtcacgccatgttcaacgaggtgtactgcaagccctcggggccatccagatcctgaatggaatactgattctagctctcggaatttttctggtttgtttacaacacgtgtcccaccacttcaggcatttcttcttcttcaccttctacacaggctacccactgtggggtgctgtgttttttatcagctcaggatccttgactgttgccgcagggagaaaccccacacgaatgctgatgcaaaacagttttgggataaacattgccagtactacaattgcatttgttgggactgttttcctttctgtgcatttggcattcaatac

SEQ ID NO: 20 - protein, 123 aa, Mus musculus
MKPEETGGSVYQPLDESRHVQRGVLQALGAIQILNGILILALGIFLVCLQHVSHHFRHFFFFTFYTGYPLWGAVFFISSGSLTVAAGRNPTRMLMQNSFGINIASTTIAFVGTVFLSVHLAFN

SEQ ID NO: 21 - DNA, 1228 bp, Mus musculus
  cDNA (1)..(1228)
  CDS (98)..(778)
ttcggcacgaggcacacaagcaaagcttctcctggaataaatcagctgacatctgatcctttccattgtctgtactgtttctgctgctctggaaaccatgcaaggacaggaacagaccaccatggcagtggttcctggagttgctgtgccttcaaagaattctgttatgacatcacaaatgtggaatgagaagaaagagaaattcttgaagggggaacccaaagtccttggggttttacaagtgatgattgctatcataaacctcagcttaggaataataattttgacaactttattttctgaactacccacttcagtgatgttaatggtcccaatttggggatcaataatgttcattgtctccggatccctgtccattgcagcaggagtgacacctacaaaatgcctgatcgttgccagtctaactctgaacactatcacctctgtgttggctgcaactgcaagcataatgggtgtagtcagtgtggctgtgggttcacagtttccgtttcggtataattatacaatcaccaagggtttggatgttttgatgttaattttcaatatgctagaattctgccttgctgtgtccgtctctgcatttggatgtgaagcttcctgttgtaactcccgtgaggttcttgtagtgctaccatcaaatcctgttgagacagtgatggcacccccaatgacacttcaaccattgctaccatcagaacaccaagggaccaatgttccaggaaatgtgtacaagaaccacccaggagaaatagtctaattttgatgtgtgtgtgtgtgtatttccctaggatattaacacttcattgcactggcttttgaggtgaatattagatttactgtaagtatgtaagtcaagcacttattaggtcaacaacacttcaacatattatattcattgtatgtacaaggggcaatgaatttgcaaagatgttttgaaagcaaacagaaaaaaaaaaaaaacaaccaaacaaaagacctcttagtgaaatgaggtctctttgcaaagactaaaaaactggagttcacatttttgggggtggggggggcttttgctaaataagtagatttagatgcttttgatcaagtacaaactcataaagtatgtaagaaattactaatgataggaaccaattttaatctcatatgtaacatagtgtataatttaatagatctggtaaaaatttataataaagagaaatgcctgaaa

SEQ ID NO: 22 - protein, 226 aa, Mus musculus
MQGQEQTTMAVVPGVAVPSKNSVMTSQMWNEKKEKFLKGEPKVLGVLQVMIAIINLSLGIIILTTLFSELPTSVMLMVPIWGSIMFIVSGSLSIAAGVTPTKCLIVASLTLNTITSVLAATASIMGVVSVAVGSQFPFRYNYTITKGLDVLMLIFNMLEFCLAVSVSAFGCEASCCNSREVLVVLPSNPVETVMAPPMTLQPLLPSEHQGTNVPGNVYKNHPGEIV

SEQ ID NO: 23 - DNA, 1480 bp, Mus musculus
  cDNA (1)..(1480)
  CDS (107)..(787)
attcggcacgatgggtgagaacacacaatcaaaacttctcctggaatatatcatctgacatcagatccttcccattgtctgtactgtttctgctgccctggaaaccatgcaaggacaggaacagaccaccatggcagtggttcctggaggtgctccaccttcagagaattctgttatgaaatcacaaatgtggaacgagaacaaggagaaattcttgaagggggaacccaaagtccttggggttgtacaagttatgattgctctcataaacctcagcttcggaataataattttggcaaatctatcttctgaaccactcatttctgtggtcttaatggctccaatttggggaccaataatgttcattgtctcaggatccctgtcaattgcagcaggagtgagacctacaaaaaagctgatcatcagcagtctaactctgaacactatcacctctgtgttggctgcaactgcaagcataatgggtgtagtcagtgtggctgtgggttcacagtttccgtttcggtataattatacaatcaccaagggtttggatattttgatgttaattttaaatatgctagaattctgcattgctgtgtccatctctgcttttggatgtaaagcttcctgttgtaactccagcgaggttcttgtagtgctaccatcaaatcctgctgtgactgtgatggcaccccctgtgacgcttcaaccattgccaccatcagaacaccaagggaaaaatgttccagaaaatgtatataagaaccactcagaagaaatagtctaattctcttgtgtgtatgtgaatgtgtgtgtgtgtgtgtgtgtgtgtgtgtatgcatttccctgggaaattaacacttcattgccctggcttttggggggaatatcagacatgccataactttgtaaatctaacatctactagtacaacaacactttaacatcctccattaattgtatgtacaaggggcaatgaattagcaaagatgttttgaaagcaaaatgaaacaaacaaacaagccagcacacaaaaaaagacctgttttgtcttttgcaaagattaaagaaaggcgttcacatttctttggggcttttgctaaataagtggatttagctgcttttgatcatgtacaaacacatgaattatgtatattatattactaatgataggaaccaatttttatctctgtgcatattcatcatataataacatactctatactgtaattgatatggtaaaaattataataaagagaagtgactgaaatcggaatacacaaacacacacacacacacacatttacatacatagtgtatatctctgtatatacatagtacgtgtatggtgtgcatgtagagattatagaaggtatacatacacatatgtgtacatattacatatgacctaaaaaatcacttataactgtggtttggtgctgtaatctcccctaaggctcacatctttgaacagttggtc

SEQ ID NO: 24 - protein, 226 aa, Mus musculus
MQGQEQTTMAVVPGGAPPSENSVMKSQMWNENKEKFLKGEPKVLGVVQVMIALINLSFGIIILANLSSEPLISVVLMAPIWGPIMFIVSGSLSIAAGVRPTKKLIISSLTLNTITSVLAATASIMGVVSVAVGSQFPFRYNYTITKGLDILMLILNMLEFCIAVSISAFGCKASCCNSSEVLVVLPSNPAVTVMAPPVTLQPLPPSEHQGKNVPENVYKNHSEEIV

SEQ ID NO: 25 - DNA, 1187 bp, Mus musculus
  cDNA (1)..(1187)
  CDS (36)..(713)
ccattgtctgtactgtttctgctgccctggaaaccatgcaaggactggcacagaccaccatggcagtggttcctggaggtgctccaccttcagagaattctgttataaaatcacaaatgtggaacaagaacaaagagaaattcttgaagggggaacccaaagtcctcggggctatacaagttatgattgctttcataaacttcagcttaggaataataattatattaaatagagtttctgaacgattcatgtcagtgctcttactggccccattttggggatcaataatgttcattttctcaggatccctgtcaattgcagcaggagtgaaacctacaaaagccatgatcatcagcagtctaagtgtgaacactatcagttctgtgttggctgtggcagcaagcattattggcgtcatcagtgtgatttctggtgtttttcgccaatttagaagtcaaccagccatcgctagtttggatgttttgatgacaattttgaatatgctagaattctgcattgctgtgtccgtctctgcatttgggtgtaaagcttcctgttgtaactccagtgaggttcttgtagtgctaccatcaaattctgctgtgacagtgacagcaccccccatgatacttcaaccattgccaccatcagaatgccaagggaaaaatgttccagaaaatctatacaggaaccaaccaggagaaatagtctaattttgatgtacgtgttttcatgtgtgagagtgtgtgtgtgcacatgtgtatgcatttggctttttgtacgaatataagacatgctctaaataagtaagtcaagcatttattaagtcaataacactttaaaatcttctattcattgtatgtacaagaagaatttaattggcaaaaaaaattttaatgtaaactgataaaaaccttggtttagtgaggtgaagtctccaaagagtgaagaatggagttcatgggttttttttgggggggggttgctaaataaataaatttggctgctcacgatcatatacagacacataaactatgtaagacagcaggtgtattaccttactaataatagcaaccaattttaatcctacatgaatgttcatcttaatagtatatgccttaattgttatggtgaaaagttacaataaacaaaagtgattgaaaaaaaaaaaaaaaaaaaaaaaaaag

SEQ ID NO: 26 - protein, 225 aa, Mus musculus
MQGLAQTTMAVVPGGAPPSENSVIKSQMWNKNKEKFLKGEPKVLGAIQVMIAFINFSLGIIIILNRVSERFMSVLLLAPFWGSIMFIFSGSLSIAAGVKPTKAMIISSLSVNTISSVLAVAASIIGVISVISGVFRQFRSQPAIASLDVLMTILNMLEFCIAVSVSAFGCKASCCNSSEVLVVLPSNSAVTVTAPPMILQPLPPSECQGKNVPENLYRNQPGEIV

SEQ ID NO: 27 - DNA, 1687 bp, Mus musculus
  cDNA (1)..(1687)
  CDS (133)..(867)
gttacaagttcacaagaaggaaccaaggatcagcctgagagaacccagagttaaggctcttcgggttcctgagagctcggctggaagtgactgggtgacaaggcacacaggctcagccgtgggagctcaatcatgattccacaagtagtgaccagtgagactgtggcaatgatttcgccaaatggaatgagtcttccccaaacagacaaaccccagcctttccaccagtggcaagacagcctgaagaaacatctaaaggctgagatcaaagtgatggcggcaatccagatcatgtgtgctgtgatggtgttgagtctgggaatcattttggcatctgttccctccaatctacactttacctcagtgttttcagtcctgttaaaatctggctacccatttataggagctttgttttttatagtctctggaattctgtccatcgtcacggagacaaagtcaacaaaaattttggtagacagcagcctgactctgaatatcctgagtgtttcatttgctttcatgggcatcattatcatctctgtcagcctggctggtttgcatcctgcctcagagcagtgcttgcagagcaaggagcttagaccaactgaatatcattactaccaattcttggacaggaacgagtgctttgccgccaagtctgttctggctggagtcttttcactgatgctgatcagtactatgttggaacttggcctggctgtcctcactgccatgctgtggtggaaacagagtcactctaacatccctgggaatgttatgttcctgccacatagctcaaataatgactccaacatggaatcaaaggtactttgtaacccctcatatgaggaacaattggtttgttaagaaaaacaaaacaaaacaaaactaaataccacaaaaacaaatggaactataccgcagaagatatgtcttcatgataatgcagaaattccaaccatcacagggtagcaatgcttgctacttaaaatgtagactgttcatacagtgggtaccagtatgagttgaatgtgtgtattactggcaccctattgattttcatgaccttggcttcagccaaagcccagacctacaaatggtggcctttcttagaaaaccaaacagaatgtttcaggccattgtagtggggaaaagggacaacattttcttgccccctgcaattaacagcaacagttaaccattagcagtctttgtattcagaatctctgctatgacgtgggtcttctatcatatcagttttattcactggtgtgaataaacaagggacctgcaatgaagtctgaagaagtttccatgttgttggttcaaaataaagtctttttgtgattgtatattctttttgtatggggttttgtgtgggttttgttgttgttgttgttttgcttttatgcacagatcaagtcctaagtggtacataaacacatgtgtttgctattttttttttgttctctatcaaccaaaaaaaaaaaaaaaaaaggcatgggaaagagaaaaaggaatatatctgtgtctctgtgtttatgtggtgtgtgtgtgtgtgtgttttaaactaaaactgaatgaacattcaaagtttagcaatgtattttggaggtaccagataacatacttatttctagaatcgccagagcaaatgagagacattttgtcgcttcttataagaggc

SEQ ID NO: 28 - protein, 244 aa, Mus musculus
MIPQVVTSETVAMISPNGMSLPQTDKPQPFHQWQDSLKKHLKAEIKVMAAIQIMCAVMVLSLGIILASVPSNLHFTSVFSVLLKSGYPFIGALFFIVSGILSIVTETKSTKILVDSSLTLNILSVSFAFMGIIIISVSLAGLHPASEQCLQSKELRPTEYHYYQFLDRNECFAAKSVLAGVFSLMLISTMLELGLAVLTAMLWWKQSHSNIPGNVMFLPHSSNNDSNMESKVLCNPSYEEQLVC

SEQ ID NO: 29 - DNA, 899 bp, Mus musculus
  cDNA (1)..(899)
  CDS (164)..(817)
aattcggcactaggaggaagggctggagacagttacaagttcacaagaaggaaccaaggatcagcctgagagaacccagagttaaggctcttagggtttctgagagctcggctggaagtgactgggtgacaaggcacacaggctcagctgtggcagctccatcatgattccacaggtagtgaccaatgagaccatcacaacgatttcaccaaatggaatcaactttccccaaaaagacgagtcccagcctacccaacagaggcaagacagcctgaagaaacatctaaaggctgagatcaaagtgatagtggcaatccagatcatgtgtgctgtgacagtgttggctctgggaatcattttggcatctgttcctcctgtcccatattttaactcagtgttttctgtcctgttaaaatctggctacccatttataggagctttgttttttattgcctctggaattttgtccatcattacggagagaaagtcaacaaaacctttggtagatgccagcctaactctgaatatcctgagtgtttcatttgctttcgtgggcatcattatcatctctgtcagcctggctggtttgcatcctgcctcagagcaatgcaagcagagcaaggagcttagtctaattgaacatgactactaccaacctttctacaactcagacaggagtgaatgtgccgtcaccaagtctattctgactggagccctttcagtgatgctgatcatcagtgtgttggagcttggtctggctttgctctctgccatgctgtggttgagagagggtgttctgacttcccttagaatgtgattttttctgtcttataactccaataatgaagccaatgtggaatcaaaggcactttgtaactgtgcatatgaggaacgattgt

SEQ ID NO: 30 - protein, 217 aa, Mus musculus
MIPQVVTNETITTISPNGINFPQKDESQPTQQRQDSLKKHLKAEIKVIVAIQIMCAVTVLALGIILASVPPVPYFNSVFSVLLKSGYPFIGALFFIASGILSIITERKSTKPLVDASLTLNILSVSFAFVGIIIISVSLAGLHPASEQCKQSKELSLIEHDYYQPFYNSDRSECAVTKSILTGALSVMLIISVLELGLALLSAMLWLREGVLTSLRM

SEQ ID NO: 31 - DNA, 1370 bp, Mus musculus
  cDNA (1)..(1370)
  CDS (110)..(853)
caaggatcagactgagaaaacccatagttaaagctcttggggtttctgagagctcagctggaagtgactgggtgacaaggcgcacaggctcagccgtggaagctccatcatgattccacaagtagtgaccagtgagactgtcacagtgatttcaccaaatggaatcagctttccccaaacagacaaaccccagccttcccaccagagccaagacagcctgaagaaacatctaaaggctgagatcaaagtgatggcggcaatccagatcatgtgtgctgtgatggtgttgagtctgggaatcattttggcatctgttccctccaatctacactttacctcagtgttttccatcctgttagaatctggctacccatttgtaggagctttgttttttgccatctctggaattctgtctattgtcacagagaaaaagatgactaagcctttggttcacagcagcctagccctgagcatcctgagtgtcctctctgctcttacaggcatcgctattctctctgtcagtttggctgctttagagcctgccttgcagcaatgtaagctggctttcacacaactagacacaacccaagacgcttatcatttctttagccctgagccattaaacagctgcttcgtggccaaagctgctctgactggagtcttttcactgatgctaatcagcagtgtgttggagcttggcctggctgtcctcactgccacactgtggtggaaacagagctcctctgctttctctgggaatgtgattttcctgtctcagaactcaaagaataaatccagtgtatcttcagagtcactttgtaaccctacatatgaaaacatattgacttcataagaattaagtagaggttatatagcagaaaaatctgtctttaacatgatttagaaaagccatttactgtgtgacaacaatgcttaatatcttgatatcttaatgtgtgtattggttaatcagcaaccatgaaaaacatactaactggctgggttcagtagcacgctcttgatttggtgtcagtcaaaacacagacctgtaaattccaatttatgtagtggtcaaagagccccaattattttctcaaaaaactggaagaatgtttcataggatcatggtggagccaatgggcaacagttcttcttatccttgtcacttggctgcaggaggtactgactagggcctgagatcatattctgtgtgcgtggcatggacttcatggcatctattttattcataagcacatgaaaacaagtcatctcttatgaagtctcaaagagcataaaaaagttagcctccaaataaagtctttatataatccccccaaaaaaaaaaaaaaaaaaaaaaaaaaaaaaaaaaa

SEQ ID NO: 32 - protein, 247 aa, Mus musculus
MIPQVVTSETVTVISPNGISFPQTDKPQPSHQSQDSLKKHLKAEIKVMAAIQIMCAVMVLSLGIILASVPSNLHFTSVFSILLESGYPFVGALFFAISGILSIVTEKKMTKPLVHSSLALSILSVLSALTGIAILSVSLAALEPALQQCKLAFTQLDTTQDAYHFFSPEPLNSCFVAKAALTGVFSLMLISSVLELGLAVLTATLWWKQSSSAFSGNVIFLSQNSKNKSSVSSESLCNPTYENILTS

SEQ ID NO: 33 - DNA, 938 bp, Mus musculus
  cDNA (1)..(938)
  CDS (105)..(809)
aacagctggtaagaggttgagtctgagttccccaggagcagagtgagcaggcccaggagctgcagcacacaggacagggctgtgaggacagcatccctggcaccatgcgtctacagcttggcaccaagaacattgggtgggactgctttccaaaggacatcattatccacaaaagagagaaaactggacatacatatgaaaaagaagatgacctgctgattggagtgcctagtgaagccacacttcttggaaccatccagctactatgtgccctgatacttgcaagctttgggggcattttggtgtcagcttcctacttcaacccagaagtttccaccactttgatatctggatacctgtttattggatccctctgttttgccattgctggaattctctccattatctctgaaaaaatctcaaccaaaccctttgcactgagcagcctggcctccaatgtagcaagctctgttgttgccgtcattggcctcttcctcttcacctattgtctgatagccctggggagtgctttcccacactgtaactcagaaaagaaattcctgtccttattgtcttacttgaaatcccaccattggaagaatgaagacaagaactgttacctggcttatgtcggtgctatgagtgctctggggatgatgcttctcttcactgtgctggaggttttcctagctggatacagttctatcttttggtggaagcaagtctactccaacaaacctgggggtacatttttcttgcctcaatcacaagatcatacccaacttgtcaaaagcaatttgttgcaataatggatatgaaataaaaaagaagaaagaagaaatctgttgctcacagcagagtacagctagacttgcctgaaatctcagctttggtagatcctaataaacatctgaagaaaaaaaaaaaaaaaaaaaaaa

SEQ ID NO: 34 - protein, 234 aa, Mus musculus
MRLQLGTKNIGWDCFPKDIIIHKREKTGHTYEKEDDLLIGVPSEATLLGTIQLLCALILASFGGILVSASYFNPEVSTTLISGYLFIGSLCFAIAGILSIISEKISTKPFALSSLASNVASSVVAVIGLFLFTYCLIALGSAFPHCNSEKKFLSLLSYLKSHHWKNEDKNCYLAYVGAMSALGMMLLFTVLEVFLAGYSSIFWWKQVYSNKPGGTFFLPQSQDHTQLVKSNLLQ

SEQ ID NO: 35 - DNA, 1025 bp, Mus musculus
  cDNA (1)..(1025)
  CDS (12)..(818)
aattcgtcgacatggaaccggagcaagagagacttacttggcaaccgggcacagtaagcatgaatacagtaacttcaccgggccccatggccaattctgtatatgtggtggcaccgcccaacagttatcctgtggtcccaggaaccgtgcctcagatgcctatttatcccagcaatcagcctcaagtccatgtgatttctggtcatctgcctggtttggtgccagctatgaccgaaccacctgcccagagagtcttgaaaaagggacaagtcctaggggccatccagatcctgatcggcctggtgcacatcggcctgggctccatcatgatcaccaacctcttcagccactatacacctgtctccctctatggaggtttccccttctggggaggcatctggtttatcatttcaggatctctctcagtggcggcagaaactcagcccaattcaccttgcctgctgaatggcagtgtgggcttgaacatcttcagcgccatctgttctgcggtgggcatcatgctcttcatcacagacatcagtatctcatcaggatacatctaccctagctactacccttaccaggagaacttgggtgtgagaacaggcgtggctatttctagtgtgctactcatcttctgcctcttggagctcagcattgcaagtgtgtcctcccactttggctgccaagtggcctgttgtcactacaacaatccaggtgtggtcattccaaatgtctatgcagcaaacccagtggtcatcccagaaccaccaaacccaataccaagttattccgaagtagttcaagactccagataagtgaacctgaagattctagagaccaagtgacatcctctcctacctagactcctataaaccaagttcttcctttcctgacgaagggtaaatatctttcttgtggcctaaattatagactcttgcttcaactcaccctggaaaaatctctattaaaacgagatgggagattgaaatggattcaaataaagatgctctagccggaaaaaa

SEQ ID NO: 36 - protein, 268 aa, Mus musculus
MEPEQERLTWQPGTVSMNTVTSPGPMANSVYVVAPPNSYPVVPGTVPQMPIYPSNQPQVHVISGHLPGLVPAMTEPPAQRVLKKGQVLGAIQILIGLVHIGLGSIMITNLFSHYTPVSLYGGFPFWGGIWFIISGSLSVAAETQPNSPCLLNGSVGLNIFSAICSAVGIMLFITDISISSGYIYPSYYPYQENLGVRTGVAISSVLLIFCLLELSIASVSSHFGCQVACCHYNNPGVVIPNVYAANPVVIPEPPNPIPSYSEVVQDSR

SEQ ID NO: 37 - DNA, 1038 bp, Mus musculus
  cDNA (1)..(1038)
  CDS (75)..(878)
gctctggatggtcaggcacagctgaagcctacaacagagttcccggggccagccagggttcccggccagggtcaatggctggccaagctcccacagcggttcccggcagtgttactggagaagtctcacgatggcagaacctaggacctgcccagcctgcacagaaagtagcccagccccaaaacctggttccagatgggcaccttgagaaagccctggagggaagtgaccttctacagaagttgggtggctttcacatcgccattgcttttgcacacttggcctttggtggctacttgatctccacagtcaagaatctgcacctggtggtgttgaagtgctggtatccactctggggaactgtctcttttctcgttgcagggatggcggccatgacaacagtgacattccctaagacctctctgaaggttctctgtgtgatagccaacgttatcagcttgttctgcgcactggccggcttctttgtcattgccaaggacctcttcctggagggtccttttccatggccaatctggagaccataccctgaacccacaacctacatccaaaggctagagctgaccctgttctgcttcaccttcctggagatcttcctgtcggggtccacagccatcacagcctataggatgaaacgcctgcaagcagaggacaaggatgacacccctttcgttcctgacacacctatggaacttaaaggtctatcgctggggccaccaccatcctataaagatgtggcccaaggacactcctcctctgatactggcagagccttggccaccagctctggactgctgctggcctctgactccttccatcaagctctgcttcacacgggcccaaggaccttgagaaagtagtctaagactactagactttcccaataaagactgagttcctgcaatgccaagtccttccctgcctcccattggctggactccggtgatgacacaggcgtgacttgcacaaataaatgcataaccactatgaaaaaaaaaaaaaaaaaaaaaaaaaaaaaaa

SEQ ID NO: 38 - protein, 267 aa, Mus musculus
MAGQAPTAVPGSVTGEVSRWQNLGPAQPAQKVAQPQNLVPDGHLEKALEGSDLLQKLGGFHIAIAFAHLAFGGYLISTVKNLHLVVLKCWYPLWGTVSFLVAGMAAMTTVTFPKTSLKVLCVIANVISLFCALAGFFVIAKDLFLEGPFPWPIWRPYPEPTTYIQRLELTLFCFTFLEIFLSGSTAITAYRMKRLQAEDKDDTPFVPDTPMELKGLSLGPPPSYKDVAQGHSSSDTGRALATSSGLLLASDSFHQALLHTGPRTLRK

SEQ ID NO: 39 - DNA, 1146 bp, Homo sapiens
  cDNA (1)..(1146)
  CDS (134)..(1027)
  ref <301>: AUTHORS: Tedder, TF, Klejman, G, Schlossman, SF, Saito, H
  ref <302>: TITLE: Structure of the gene encoding the human B lymphocyte differentiation antigen CD20 (B1)
  ref <303>: JOURNAL: J Immunol
  ref <304>: VOLUME: 142
  ref <305>: ISSUE: 7
  ref <306>: PAGES: 2560-2568
  ref <307>: DATE: 1989
  ref <301>: AUTHORS: Tedder, TF, Streuli, M, Schlossman, SF, and Saito H
  ref <302>: TITLE: Isolation and structure of a cDNA encoding the B1 (CD20) cell-surface antigen of human B lymphocytes
  ref <303>: JOURNAL: Proc Natl Acad Sci USA
  ref <304>: VOLUME: 85
  ref <305>: ISSUE: 1
  ref <306>: PAGES: 208-212
  ref <307>: DATE: 1988
cctcaatgacactcatggaggaaatgctgagagaagcattcagatgcatgacacaaggtaagactgccaaaaatcttgttcttgctctcctcattttgttatttgttttatttttaggagttttgagagcaaaatgacaacacccagaaattcagtaaatgggactttcccggcagagccaatgaaaggccctattgctatgcaatctggtccaaaaccactcttcaggaggatgtcttcactggtgggccccacgcaaagcttcttcatgagggaatctaagactttgggggctgtccagattatgaatgggctcttccacattgccctggggggtcttctgatgatcccagcagggatctatgcacccatctgtgtgactgtgtggtaccctctctggggaggcattatgtatattatttccggatcactcttggcagcaacggagaaaaactctaggaagtgtttggtcaaaggaaaaatgataatgaattcattgagcctctttgctgccatttctggaatgattctttcaatcatggacatacttaatattaaaatttcccattttttaaaaatggagagtctgaattttattagagctcacacaccatatattaacatatacaactgtgaaccagctaatccctctgagaaaaactccccatctacccaatactgttacagcatacaatctctgttcttgggcattttgtcagtgatgctgatctttgccttcttccaggaacttgtaatagctggcatcgttgagaatgaatggaaaagaacgtgctccagacccaaatctaacatagttctcctgtcagcagaagaaaaaaaagaacagactattgaaataaaagaagaagtggttgggctaactgaaacatcttcccaaccaaagaatgaagaagacattgaaattattccaatccaagaagaggaagaagaagaaacagagacgaactttccagaacctccccaagatcaggaatcctcaccaatagaaaatgacagctctccttaagtgatttcttctgttttctgtttccttttttaaacattagtgttcatagcttccaagagacatgctgactttcatttcttgaggtactctgcacatacgcaccacatctctatctggcc

SEQ ID NO: 40 - protein, 297 aa, Homo sapiens
MTTPRNSVNGTFPAEPMKGPIAMQSGPKPLFRRMSSLVGPTQSFFMRESKTLGAVQIMNGLFHIALGGLLMIPAGIYAPICVTVWYPLWGGIMYIISGSLLAATEKNSRKCLVKGKMIMNSLSLFAAISGMILSIMDILNIKISHFLKMESLNFIRAHTPYINIYNCEPANPSEKNSPSTQYCYSIQSLFLGILSVMLIFAFFQELVIAGIVENEWKRTCSRPKSNIVLLSAEEKKEQTIEIKEEVVGLTETSSQPKNEEDIEIIPIQEEEEEETETNFPEPPQDQESSPIENDSSP

SEQ ID NO: 41 - DNA, 894 bp, Homo sapiens
  cDNA (1)..(894)
  CDS (51)..(785)
  ref <301>: AUTHORS: Kuster, H, Zhang, L, Brini, AT, MacGlashan, DWJ, Kinet, J-P
  ref <302>: TITLE: The gene and cDNA for the human high affinity immunoglobulin E receptor beta chain and expression of the complete human receptor
  ref <303>: JOURNAL: J Biol Cham
  ref <304>: VOLUME: 267
  ref <305>: ISSUE: 18
  ref <306>: PAGES: 12782-12787
  ref <307>: DATE: 1992
tctcaatataataatattctttattcctggacagctcggttaatgaaaaaatggacacagaaagtaataggagagcaaatcttgctctcccacaggagccttccagtgtgcctgcatttgaagtcttggaaatatctccccaggaagtatcttcaggcagactattgaagtcggcctcatccccaccactgcatacatggctgacagttttgaaaaaagagcaggagttcctgggggtaacacaaattctgactgctatgatatgcctttgttttggaacagttgtctgctctgtacttgatatttcacacattgagggagacattttttcatcatttaaagcaggttatccattctggggagccatatttttttctatttctggaatgttgtcaattatatctgaaaggagaaatgcaacatatctggtgagaggaagcctgggagcaaacactgccagcagcatagctgggggaacgggaattaccatcctgatcatcaacctgaagaagagcttggcctatatccacatccacagttgccagaaattttttgagaccaagtgctttatggcttccttttccactgaaattgtagtgatgatgctgtttctcaccattctgggacttggtagtgctgtgtcactcacaatctgtggagctggggaagaactcaaaggaaacaaggttccagaggatcgtgtttatgaagaattaaacatatattcagctacttacagtgagttggaagacccaggggaaatgtctcctcccattgatttataagaatcacgtgtccagaacactctgattcacagccaaggatccagaaggccaaggtcttgttaaggggctactggaaaaatttctattctctccacagcctgctggtttt

SEQ ID NO: 42 - protein, 244 aa, Homo sapiens
MDTESNRRANLALPQEPSSVPAFEVLEISPQEVSSGRLLKSASSPPLHTWLTVLKKEQEFLGVTQILTAMICLCFGTVVCSVLDISHIEGDIFSSFKAGYPFWGAIFFSISGMLSIISERRNATYLVRGSLGANTASSIAGGTGITILIINLKKSLAYIHIHSCQKFFETKCFMASFSTEIVVMMLFLTILGLGSAVSLTICGAGEELKGNKVPEDRVYEELNIYSATYSELEDPGEMSPPIDL

SEQ ID NO: 43 - DNA, 1646 bp, homo sapiens
  cDNA (1)..(1646)
  CDS (99)..(743)
  ref <301>: AUTHORS: Adra, CN, Lelias, JM, Kobayashi, H, Kaghad, M, Morrison, P, Rowley, JD, Lim, B
  ref <302>: TITLE: Cloning of the cDNA for a hematopoietic cell-specific protein related to CD20 and the beta subunit of the high-affinity IgE receptor: evidence for a family of proteins with four membrane-spanning regions
  ref <303>: JOURNAL: Proc Natl Acad Sci USA
  ref <304>: VOLUME: 91
  ref <305>: ISSUE: 21
  ref <306>: PAGES: 10178-10182
  ref <307>: DATE: 1994
tagtgatcttttctgagtgtctcctacttgcgacaaggtggacttgggaggaaagccgtctgccaaagcctgaagcctccaagccataaacaaccccaatggcctcccacgaagttgataatgcagagctggggtcagcctctgcccatggtaccccaggcagtgagacgggaccagaagagctgaatacttctgtctaccaccccataaatggatcaccagattatcagaaagcaaaattacaagttcttggggccatccagatcctgaatgcagcaatgattctggctttgggtgtctttctgggttccttgcaatacccataccacttccaaaagcacttctttttcttcaccttctacacaggctacccgatttggggtgctgtgtttttctgtagttcaggaaccttgtctgttgtagcagggataaaacccacaagaacatggatacagaacagttttggaatgaacattgccagtgctacaattgcactagtggggactgcttttctctcactaaatatagcagttaatatccagtcattaaggagttgtcactcttcatcagagtcaccggacctatgcaattacatgggctccatatcaaatggcatggtgtctctactgctgattctcaccttgctggaattatgcgtaactatctctaccatagccatgtggtgcaatgcaaactgctgtaattcaagagaggaaatttcctcacctcccaattctgtgtaatcaagaatacctccttatgaaaataattctgagagcatgaatatttgaccttaaatctccagtgactcagagcttcacccacaaactcaggagaacataagcctgctcgtaaagctcaatccttctatcatggcaccaatcacaagaaccttggacgtttgactgactctatcctttctctcctaactataaatcctatttgtgtgtcgtgggtatggaaggacagatatatttctttaggcattcttggatatctgtaacttctatgatcattactccaaagttgtttccagaaattggttctatttcttcttatccacctactccattgctttatgaggtttaaggaaggaaggcggtataatccctattcaatatattttttctaaaatccaacttctgaccgcccagtaggaagaaaaatgagacattttttccattacagagaaatgcttcttgactttaacatcagcattataaaaagtgtcaaataaaaaattaccatcattatcattaaaataaattttcactgtatttgagatgggagggttaaggctcagggattttatttcagtgaactgctggaactcacacatgccctgatatgtaaatgatgatttatgttggcgagtctgagagcaagcccaaatgtgttcttcaaaggacaatgggaaactgtaaagtagagaactaaagaataaggcctttagaatctgacacatctgggttcaaattctgaaactgtcacttattacctgtatgaacatgggcaaattatctaatctctctgatctatttttcctcatctgtaaaataggtgtaataataacaactactttgtcggttgctctgagggttaaatgaaaataaaaagaaaatgtgaaacagcaccacaggtacttg

SEQ ID NO: 44 - protein, 214 aa, homo sapiens
MASHEVDNAELGSASAHGTPGSETGPEELNTSVYHPINGSPDYQKAKLQVLGAIQILNAAMILALGVFLGSLQYPYHFQKHFFFFTFYTGYPIWGAVFFCSSGTLSVVAGIKPTRTWIQNSFGMNIASATIALVGTAFLSLNIAVNIQSLRSCHSSSESPDLCNYMGSISNGMVSLLLILTLLELCVTISTIAMWCNANCCNSREEISSPPNSV

SEQ ID NO: 45 - DNA, 1182 bp, Homo sapiens
  cDNA (1)..(1182)
  CDS (58)..(861)
acacaggttggagcagagaaagaggaaacatagaggtgccaaaggaacaaagacataatgatgtcatccaagccaacaagccatgctgaagtaaatgaaaccatacccaacccttacccaccaggcagctttatggctcctggatttcaacagcctctgggttcaatcaacttagaaaaccaagctcagggtgctcagcgtgctcagccctacggcatcacatctccgggaatctttgctagcagtcaaccgggtcaaggaaatatacaaatgataaatccaagtgtgggaacagcagtaatgaactttaaagaagaagcaaaggcactaggggtgatccagatcatggttggattgatgcacattggttttggaattgttttgtgtttaatatccttctcttttagagaagtattaggttttgcctctactgctgttattggtggatacccattctggggtggcctttcttttattatctctggctctctctctgtgtcagcatccaaggagctttcccgttgtctggtgaaaggcagcctgggaatgaacattgttagttctatcttggccttcattggagtgattctgctgctggtggatatgtgcatcaatggggtagctggccaagactactgggccgtgctttctggaaaaggcatttcagccacgctgatgatcttctccctcttggagttcttcgtagcttgtgccacagcccattttgccaaccaagcaaacaccacaaccaatatgtctgtcctggttattccaaatatgtatgaaagcaaccctgtgacaccagcgtcttcttcagctcctcccagatgcaacaactactcagctaatgcccctaaatagtaaaagaaaaaggggtatcagtctaatctcatggagaaaaactacttgcaaaaacttcttaagaagatgtcttttattgtctacaatgatttctagtctttaaaaactgtgtttgagatttgtttttaggttggtcgctaatgatggctgtatctcccttcactgtctcttcctacattaccactactacatgctggcaaaggtgaaggatcagaggactgaaaaatgattctgcaactctcttaaagttagaaatgtttctgttcatattactttttccttaataaaatgtcattagaaacaaaaaaaaaaaaaaaaaaa

SEQ ID NO: 46 - protein, 267 aa, Homo sapiens
MMSSKPTSHAEVNETIPNPYPPGSFMAPGFQQPLGSINLENQAQGAQRAQPYGITSPGIFASSQPGQGNIQMINPSVGTAVMNFKEEAKALGVIQIMVGLMHIGFGIVLCLISFSFREVLGFASTAVIGGYPFWGGLSFIISGSLSVSASKELSRCLVKGSLGMNIVSSILAFIGVILLLVDMCINGVAGQDYWAVLSGKGISATLMIFSLLEFFVACATAHFANQANTTTNMSVLVIPNMYESNPVTPASSSAPPRCNNYSANAPK

SEQ ID NO: 47 - DNA, 1388 bp, Mus musculus
  cDNA (1)..(1388)
  CDS (178)..(1053)
  ref <301>: AUTHORS: Tedder, TF, Klejman, G, Disteche, CM, Adler, DA, Schlossman, SF, Saito, H
  ref <302>: TITLE: Cloning of complementary DNA encoding a new mouse B lymphocyte differentiation antigen, homologous to the human B1 (CD20) antigen and localization of the gen to chromosome 19
  ref <303>: JOURNAL: J Immunol
  ref <304>: VOLUME: 141
  ref <305>: ISSUE: 12
  ref <306>: PAGES: 4388-4394
  ref <307>: DATE: 1988
gaattccttttttttttttttttttaaagatttatttattattatatgtaagtacactgtagctatcttcaagtacttgagatagaagaggccaactgatctcagctgtgagtggctaatttggcccttaagccttggagccttggagccttggagacccaggcgtttgaaaactcaatgagtggacctttcccagcagagcctacaaaaggtcccctcgccatgcaacctgctccaaaagtgaacctcaaaaggacatcttcactggtgggccccacacaaagcttcttcatgagggaatcaaaggctttgggggctgtccaaatcatgaatggcctcttccatattaccctggggggactgctgatgatccccacaggggtcttcgcacccatctgtttgagtgtatggtaccctctctggggaggcattatgtacattatttcaggatcactcctggcagctgcagcagaaaaaacctccaggaagagtttggtcaaagcaaaagtgataatgagctctctaagcctctttgctgccatttctggaataattctttcaatcatggacatacttaacatgacactttctcattttttaaaaatgagaagactggagcttattcaaacttccaagccgtatgttgatatctacgactgtgaaccatctaattcctcagagaaaaactccccatctacacagtactgtaacagcattcagtctgtgttcttgggcattctgtcggcgatgctgatctctgccttcttccagaaacttgtgacagctggtattgtggagaatgagtggaaaagaatgtgtaccagatccaaatctaatgtggttctgctgtcagctggagaaaaaaatgagcagacgattaaaatgaaagaagaaatcattgagctaagtggagtatcttcccaaccaaagaatgaagaggaaattgaaattattccagtgcaggaggaagaagaagaagaagcagaaataaattttccagcacctccccaagagcaggaatccttgccagtggaaaatgagatcgctccttaaactcttttcttttctaagcattattgtttagagagcttccaagacacatagttaccctcatctcttgtggccttccacaatctattctccatattttcacagcttaactttgcatagagaagccacatctagctctccttcacatttgaagaatgcagtgattataaaagattgtcttttgccttgcttagggagtcttacactggcagaaacgctgaagaatccaattctcattcaccttttccttggatgtgtgtctcagtagtggtaatggtttttccgcatttcctccatcagcagttacagcagaaggagtcagagagttcagggaattc

SEQ ID NO: 48 - protein, 291 aa, Mus musculus
MSGPFPAEPTKGPLAMQPAPKVNLKRTSSLVGPTQSFFMRESKALGAVQIMNGLFHITLGGLLMIPTGVFAPICLSVWYPLWGGIMYIISGSLLAAAAEKTSRKSLVKAKVIMSSLSLFAAISGIILSIMDILNMTLSHFLKMRRLELIQTSKPYVDIYDCEPSNSSEKNSPSTQYCNSIQSVFLGILSAMLISAFFQKLVTAGIVENEWKRMCTRSKSNVVLLSAGEKNEQTIKMKEEIIELSGVSSQPKNEEEIEIIPVQEEEEEEAEINFPAPPQEQESLPVENEIAP

SEQ ID NO: 49 - DNA, 1010 bp, Mus musculus
  cDNA (1)..(1010)
  CDS (23)..(730)
  ref <301>: AUTHORS: Ra, C, Jouvin, M-He, Kinet, J-P
  ref <302>: TITLE: Complete structure of the mouse mast cell receptor for IgE (FceRI) and surface expression of chimeric receptors (rat-mouse-human) on transfected cells
  ref <303>: JOURNAL: J Biol Chem
  ref <304>: VOLUME: 264
  ref <305>: ISSUE: 26
  ref <306>: PAGES: 15323-15327
  ref <307>: DATE: 1989
ggatagcccaattaatgaaaaaatggacacagaaaataggagcagagcagatcttgctctcccaaatccacaagaatcctccagtgcacctgacattgaactcttggaagcatctcctgccaaagcagccccaccaaagcagacatggcggacatttttgaagaaagagttggagttcctgggagcaacacaaattctggttggtttgatatgcctttgttttggaacaattgtctgctccgtactctatgtttcagactttgatgaagaagtgcttttactttataaactaggctatccattctggggtgcagtgctgtttgttttgtctggatttttgtcaattatctccgaaagaaaaaacacattgtatctggtgagaggcagcctgggagcaaacattgtcagtagcatcgctgcagggacggggatcgccatgctgatcctcaatctgaccaataacttcgcttatatgaacaactgcaagaatgtaaccgaagacgacggctgctttgtggcttctttcaccacagaactggtgttgatgatgctgtttctcaccatcctggccttttgcagtgctgtgttgttcactatctataggattggacaagagttagaaagtaaaaaggtcccagatgatcgtctttatgaagaattaaatgtgtattcaccaatttacagtgagttggaagacaaaggggaaacatcttctccagttgattcataagaatcaggggaccaggacaatctgattcaagtataatcttgaaagttgatctttttacaaaattctcgcaaaatttctgtttgttccacattctgtcagtttttcaattggattgttctgcagatgccactcttttagttatgctgtatctgatcttctaaatatctccctttttgcggatatcattcactccaattttcttgttttgtgtcacaatttcacatacatcttttctggaaagtcatcaaggaataagttggctttattgtatgtctacttt

SEQ ID NO: 50 - protein, 235 aa, Mus musculus
MDTENRSRADLALPNPQESSSAPDIELLEASPAKAAPPKQTWRTFLKKELEFLGATQILVGLICLCFGTIVCSVLYVSDFDEEVLLLYKLGYPFWGAVLFVLSGFLSIISERKNTLYLVRGSLGANIVSSIAAGTGIAMLILNLTNNFAYMNNCKNVTEDDGCFVASFTTELVLMMLFLTILAFCSAVLFTIYRIGQELESKKVPDDRLYEELNVYSPIYSELEDKGETSSPVDS

SEQ ID NO: 51 - DNA, 2542 bp, rat
  cDNA (1)..(2542)
acgtttctgtgtaacaatatcttttattcctggatagtccaattaatgaaaaaaatggacacagaaaataagagcagagcagatcttgctctcccaaacccacaagaatcccccagcgcacctgacattgaactcttggaagcgtcccctcctgcaaaagctctaccagagaagccagcctcacccccaccacagcagacatggcagtcatttttgaagaaagagttggagttcctgggcgtaacccaagttctggttggtttgatatgcctttgttttggaacagttgtctgctccacactccagacttcagactttgacgacgaagtgcttttattatatagagcaggctacccattctggggtgcagtgctgtttgttttgtctggatttttgtcaattatgtccgaaaggaaaaacacactgtatctggtgagaggcagcctgggagcaaacattgtcagcagcatcgctgcaggcttggggatcgccatattgattctcaatctgagcaacaactccgcttatatgaactactgcaaggatataaccgaagacgatggttgcttcgtgacttctttcatcacagaactggtgttgatgttgctgtttctcaccatcctggccttttgcagtgccgtgctgctcattatctataggattggacaagaatttgagcgtagtaaggtccccgatgaccgtctctatgaagaattacatgtgtattcaccaatttacagtgcgttggaagacacaagggaagcgtccgcaccagtggtttcataagaatcaaggggccaggacaatctgattccagtatagtcttgagagtcgatctttttgcaacattatggcaacatttctgtttcctccgcactctatcaacttttcaattggattgttctgtagatacccctgtttcagttatgatgcctctggtctttaattatctccctttttgtggatatcgttcaatccagttttcttgttttgtgtcacagtctcacatacaacctttctggaaagtcatcaaaaacaagctagcttttattgcatgtctactttcatgaacaaaaggaaggaggagttattttgagagtttaactaaacttagataatcaggtaatatttgactcttagttcattttagaattctcaacaatacttgtgcatgatatatgcccaccatatcaagccttctatatatatttaatatggtatttacttttctatgtagatagattttccaccctcaataataatgggtttttcagagacataaagctttatgaaaagacacatattatctaattcatgggtatattcactaatacagttgttgctcagtggtgtttactacttggtgggtagtaggtaatagagaacattattaaatcattcagtgtagtgagatgcataggtaaaatcagggacactgtgagtgtgtatatcttttggtaagacatgtgtgaaaatgaagaataaactgatgaagacttgagctggaaagtagtcaatgggaatgacaagaaatgattgtgtataacacttgtagataaataactaccaacaattggtagagattgccatgtatgcctaaaatctcccagcccaaggccagcctctgttacacagtgagttagaggccagtctgggctacacaagatcatacatcaaaggacgaaagaagatgttggttcaaactgttaacacagtaagggatatttaaacaaacagaagtttgactgatatattgagtgcttgagtttttaataaaactgaatgaataacattgcgggggaggggagcagtgatgcagaagtctggatgatggaggagtagcagaatcagatgaaacattgaaacgtatttccagacttttgttctgagatggttataagagcaatcaccattaaatgaagaaggtcaagacaccaaaagaattattttgagatagaattaagacagtcaaaatccacatgcctatacttagaaggtgaagtaaggatcaaaagtagaaagcctaacgattagttggaaaagcatattacgttaggcagcagatgtctatagtggagaaaagttaaacaaggagaaataatgaaccaccagagactctacatgttggtttgggaaataagagaaaatagcaattctaaacgaatgcaaactctgaagaagcatttcccaaagggtgtgggcagaggaccagaacatttgcaaatgtacctagagagcaaacctgaataggaggtaaaatgggggaaaagcagctaagaaaatgattttgttgctgttatttagattttaaaagaaacaaaaagagtcattaaaaatctgtttgctgggatcagttattgtgttctctgtgtatgtccaaagtacaggtaacttttctaaatcttcctgtaaggctcacctcatatgtctcttcacatagccacacccttgattcacagttactctaccacagtagtaaactgtgcttgtggtctccttatgtatcttccactagtgtttataaaataaatcagaattattt

SEQ ID NO: 52 - protein, 243 aa, rat
MDTENKSRADLALPNPQESPSAPDIELLEASPPAKALPEKPASPPPQQTWQSFLKKELEFLGVTQVLVGLICLCFGTVVCSTLQTSDFDDEVLLLYRAGYPFWGAVLFVLSGFLSIMSERKNTLYLVRGSLGANIVSSIAAGLGIAILILNLSNNSAYMNYCKDITEDDGCFVTSFITELVLMLLFLTILAFCSAVLLIIYRIGQEFERSKVPDDRLYEELHVYSPIYSALEDTREASAPVVS

SEQ ID NO: 53 - DNA, 1323 bp, dog
  cDNA (1)..(1323)
cccagctcactgcaccaacgtccttccctggccgacagctcggctaatgagaaaatggagccagaaaacagtggcagggcaggccttgctctcccgaacccgcagggaccctccagtgcacctgaaattgaactttcagaagtacctctccgtgaaaaccccttactggagaaggctggttcatccccaccgtgccatacgtggctgatgtttctgaagagggagctggaatttctgggggtaacacaaattctgattgccttggtatgtctttgttttggaataattgtctgctccgtgatcaatatttcagaatttaaggaagacattttttcatcatttaaagcaggctacccattctggggagcagtgttttttgctatttctggatttttgccaattatgtctgaaaagaaacatgctacatatctggcgtggggcagcctgggagccaacactgtccagatagctgcgggaataggaatctttatctacggtcaacctgcagacctgcagaggagctcggcttacatccacaactgccagcaagctcccagagacgacttctgctttgtggcttgtttttccacagaaattgtggcaatgatcctgtttctcactattctggggttttgcagtgctgtgtcactgacgatctatggagttggagaattagtccaagggaacaagattgtagaagatcgtctttatgaagaattaaacatatattcaccgatttacagtgagctggaagacaaagcggaggaatcttctcctgttgattcataagaattgtgttcagaacattctcacagaaaagggtctagaataagccaagatctttgttaaaggggctacaggcaaaattttgattcttgtctatgatctgctagttttacactaggatttattctccaaatggtatatgctgcctgttgtttctgttcacctaaaattcccctcccaccacccacttatgggtatgtgatagactcctattttcttgtttctattgctctctggtagcactttatggaagtcacgtgtaatgagcaagcatttattctgtgcctataactgtacaaatagagggaacaagtggaaggggttgagagctgagttaaactttctgttttggaacacctgggtggatccgtcaattaagagtctgactcttgactgcagactcaggtcatgagatcaagccccatgtcaggctcctcactcagtggggagtctgcttgggattctttctctccttctccctctatcccttcttctgctctctgtctcccaatctcataaataaataaatataatttt

SEQ ID NO: 54 - protein, 137 aa, dog
MNSGRAGANGSSASVRNKAGSSCHTWMKRGVTAVCCGVCSVNSKDSSKAGYWGAVASGMSKKHATYAWGSGANTVAAGGYGADRSSAYHNCARDDCVACSTVAMTGCSAVSTYGVGVGNKVDRYNYSYSDKASSVDS

SEQ ID NO: 55 - DNA, 1222 bp, pig
  cDNA (1)..(1222)
  CDS (96)..(827)
gtaatatccaggtaagtatctcagattagcacagagcttggagaagagagagacagagagaggaagccaagaagtgccaaaggaacagagacaaaatgatgtcatccaagccaacaacctaccctggagtgtatggaaccacacctgatctttacccaccaagtaactttatggtgcctgggtctcaacaacccccagggttcatcaacccacgaatccaagttcagagtagccaggcacctttcatcgtctctccaggaatccccaataacagtcagcaggttcaaggaaatatacaaatggtaaatccaggtacaggaaaagcagccacaaactttaaagaagaagcaaagacactaggggcaatccagatcctgattggatcaatgcacattggcttcggaattattctgggcttaatgggccgcacttatatgcaagttttgggttttgcttccttggcttttgttagcggatatccattctggggcggcctctctttcattattactggaattctctgtattttggcatccaagaagtcttcccctgctctgataaaaagcagcctgggaatgagtattgttagttccttctttgccttcattgggatgatcctgttgctggtggatgaaagcatcaacgggctgcccgagcaagactactgggcggtgctttctggaaaaggcatttcagccatgctgattatcttctctctcttggagttctgcataacttgtgtcacagcctattttgccagccacaccatcaccaacaccaggggtctgtcctggtcattccacctgtgtatgcaaacagtcccttgacgacaggattgtcctcagttcctcccccagttccggccacttagctcacaccacctaataccagtaggtattaaaagaagaagaagcatcctgcaatttcatgggggtagaaccgctctgcagaaacttcttaagaagttggtcttcgccgttcacgatgattgctaatctttaaagactgtgtttcaggttctgttcttggtttgtcatgaatgaaaactctatggacctctctaccagtgtttcttcctacatgccactaccacgtgctggcaaaggtgaagggctggaggactggaaatgactctgcaactctcttaaagttagaaatttcctgttaaagttacccttccctcaataaaatgttactaggagcaaaaaaaaaaaaaaaaaaa

SEQ ID NO: 56 - protein, 243 aa, pig
MMSSKPTTYPGVYGTTPDLYPPSNFMVPGSQQPPGFINPRIQVQSSQAPFIVSPGIPNNSQQVQGNIQMVNPGTGKAATNFKEEAKTLGAIQILIGSMHIGFGIILGLMGRTYMQVLGFASLAFVSGYPFWGGLSFIITGILCILASKKSSPALIKSSLGMSIVSSFFAFIGMILLLVDESINGLPEQDYWAVLSGKGISAMLIIFSLLEFCITCVTAYFASHTITNTRGLSWSFHLCMQTVP

SEQ ID NO: 57 - protein, 6 aa, Homo sapiens, Mus Musculus
  conserved_motif (1)..(6): X is any amino acid
  misc_feature (4)..(4): Xaa can be any naturally occurring amino acid
LGAXQI

SEQ ID NO: 58 - protein, 4 aa, Homo Sapiens, Mus Musculus
LSLG

SEQ ID NO: 59 - protein, 6 aa, Homo sapiens, Mus musculus
  misc_feature: X is any amino acid
  misc_feature (3)..(3): Xaa can be any naturally occurring amino acid
SGXLSI

SEQ ID NO: 60 - protein, 6 aa, Homo Sapiens, Mus Musculus
GYPFWG

SEQ ID NO: 61 - protein, 8 aa, Homo Sapiens, Mus Musculus
FIISGSLS

SEQ ID NO: 62 - protein, 15 aa, Homo Sapiens, Mus Musculus
  conserved_motif (1)..(15): X is any amino acid
  misc_feature (3)..(4): Xaa can be any naturally occurring amino acid
  misc_feature (6)..(7): Xaa can be any naturally occurring amino acid
  misc_feature (9)..(11): Xaa can be any naturally occurring amino acid
  misc_feature (13)..(14): Xaa can be any naturally occurring amino acid
SLXXNXXSXXXAXXG

SEQ ID NO: 63 - DNA, 21 bp, Mus musculus
cacgaggcacacaagcaaagc

SEQ ID NO: 64 - DNA, 25 bp, Mus musculus
aagtgcttgacttacatacttacag

SEQ ID NO: 65 - DNA, 24 bp, Mus musculus
tgggtgagaacacacaatcaaaac

SEQ ID NO: 66 - DNA, 24 bp, Mus musculus
cacatacacacaagagaattagac

SEQ ID NO: 67 - DNA, 24 bp, Mus musculus
ccattgtctgtactgtttctgctg

SEQ ID NO: 68 - DNA, 23 bp, Mus musculus
gccaaatgcatacacatgtgcac

SEQ ID NO: 69 - DNA, 24 bp, Mus musculus
ctggaagtgactgggtgacaaggc

SEQ ID NO: 70 - DNA, 22 bp, Mus musculus
caatcgttcctcatatgcacag

SEQ ID NO: 71 - DNA, 25 bp, Mus musculus
agactctggtggtcattactgtctc

SEQ ID NO: 72 - DNA, 22 bp, Mus musculus
gaatgccaaatgcacagaaagg

SEQ ID NO: 73 - DNA, 12952 bp, homo sapiens
  genomic_DNA (1)..(12952): n is an undetermined nucleotide (dATP, dCTP, dGTP, or dTTP)
  initial_coding_region (4390)..(4548)
  coding_region (5017)..(5136)
  coding_region (6303)..(6359)
  misc_feature (7060)..(7122): n is a, c, g, or t
  coding_region (7813)..(8049)
  coding_region (8851)..(8952)
  coding_region (10142)..(10357)
tatctcatattctcaaaatgatactttgaaatggggaaggtaactattaccttaaacttacagagagaccacaagaggagcaagcaagagagctgggactaactctgtctgctacatattgccagaaattgggagactgaaggtgcaaagaagaaataatttcttggaagggctaacagcttggttggactgagatgggctgaaaagcacagagggaagggaagtaagagcactcttcctcggagataggtgcacaggaggccagaagggataaaaatgcaaaactattttgagtggaagagaatgaagatgaggtaacaacagtgaggcagtttttaaacttctcagtacatgatggtacgagtggacttaaaagtctattcaaaccaaaacccataaaggctgtgagatcttattcagtggatggacatgaaaacaggggtgcctttaaaaataaaaaaatatttgcaggagttagtgtgagtaattaaatgcggtactgagtgatcacctgagtctctattttaacattcatgctgatttggacaccagcaaatgtaaaatcttattgttatcatattgcggctaatgtggtccataacccctactaatctaccaactagtctttgagcataactgtgcattgggcactaagtcattgtgaacaatttattttaatgataaggcaaaattgcgagaatctccaatctccgtaggcgagttttatgtatttatgaattctcatggaacgaaagcttttcattacagtcagcccacaatgccataaatcgattaatatatttacctctcatatatgagacagatatatatataatcagatatatatatgaaagatagtttccataagaaataaaaaaacagagaaagcactcatgtgtttcttttataaactactattttatacaaatatttgtttaaggtttgtagaagtatagttgccaccatgagataccattttaacagagaaatatcacacacacacacacacagccctcatggtcattattgccattagttacaacaggcatagcccaagtagaattggcttacaaaaaagtttatctcgccataatacagacacagctttaatcaagcagttgatgaataaaatgaaattaaaacaatggcagtccaatcatctccttcagttcaaacaattgatgacctttgcattttaagttatcttcactaaagttacccctctggggcggagtgtagtgactcccagctcattccatacttgccataggaccttgggaaaaataacctctctcaacctccatttcttcatctgcagaaagtagtcaaaatgcctacttacgaaggtgttgagtgagttggcaataccatatacaatatctctagtatatagtaggtgctcagtaaacaactataattatctggactcacctatggtacagcagaaaaagcatcaacatcagagccatggtgagtgccttctagcttggctctgttgctaactgtgaggtctttactaaggcaaattctatacccagactgcagcttcctcatttgtgaaatgaacagaatggtttctgaggtttggactagctctagaaatcctacctagtgaccagaatcagtccgcaaactctttagtgggctatattaaaatatctgtttttgttagaggtcttgtagagtggcttgttgtacaaagcagatccccaggaccatgtggcatctggctatctagggcaggggcaaaatcaagtgagaaacaaccaaagtttcttctctctttcctctagcccatgcgccagacagataatacttttcaactgatttatagtcattcacatagtgcatatattggaaggagaaaagaggggtcataagggaaaggctgaattcctatttctcacaggagacaaagcagcctggtaccctggatgcctaatttgagagatccaagtcttcattttaaatctttacaggctgggcatggtggctcacagctgttatcctagcactttgggaggtggaggggggcagattgcttgagtccaggagttcaagaccagcctgggcaacatggcaagaccccatctctaaaaaaaatataaaaattagctgagtatggtggtggttgcccgtggtcccagctactccagtggctgaggcagaaggatcacctgagcccaggaggtagaggctgcagtgagctgtgatcatgacactgcactgcagcctgggcgacagagcgaggccctgtcatgaaaacaaacaaacaaacaaaaaatatttactaattatgtaacttggcacaagtaacctagcttctccgtgcccttgtttcctcttctataaaacacaggtgatgattcaccccttgcctgttctataaggctcagatgagatgccatgtgtcaaatttacttccagccctaaagtaggtataaatgtgacagtagtcagctgcctgttttacagcacacctgcagctactcagctctgattgacttcagtaagatatacttcaggctgtggtctaatggctgggatgtggcaccggcttcagtaagatatgtgacctggatagacagtcttgatttccaagacatcttacatgacttacaagcaataaagacaagagcaaagatgtgtccccaaaagagggattttcagattccaggaaagacccagtggagtccgcataagtggttaacatgaacaagtgaatgctaaggaaacccaagatgaagattgaacagaatcttaaaatgtctgagctggaaagggccgtattaattgccttctcacttcagaaatgaataaatcatgaaaactgataaatagcatttactacactctccctttgtcctaggcacaattacatatgttaacttatttatgtcttacatctcagagaggggtactgttctaactttacagaaggataaaatcgaaactaatgctcagcaaagtacaaagaacaagaatagcaacaaaaataactatttattccaacatgggttctttgcatacatttatttcttcaataatatttattaagaagtaactaaatccaaaaattattttagatcctgaacaagagagaacaaaatctctactttgatggaacttccattctgtggggaagagactgacaataagcaattaaataaataaggtaatttcctacagtgatcaatgccgtaaagcaattaagataggattttgtaaaagacagcaaataggagtacatgttatagattgagggttcaaggtaggctcctctaggagctgacatttgagctacacctgaacaaaaagacactagccatgcacagaccatgagcccagttaagtgttatagcagcccacgagataagaattattattatttcaattttacagttgaacctgaggcccagagaatttaaagaacttgcccaacatctcagaacaaatggaggaatcactattgaaacctaggcaatctgactcaggaggccacagtcttatatactgcattagaaagccttagagagccttttctttttctttgagaccgagtctcactctgttacccaggctggaatgcagtggcatgatctcagctcactgcaacctctgcctcctgggttcaagcaattctcctgccttagcctcccgagtagctgggattacaggtgcacaccaacatgcctggctaatttttgtatttgtagtagagatggggttttgccacgttagccagcccggtctcaaactcctgacctcaggtgatctgcccatcttggcctcccaaagtgcttggattacaggcatgagccaccgtgcccgacctagagagccttcttgatgtgacttgcacaaggtggcagagttagagacagagagaggcctggaatcgacccctcctgcttctacagatagtccttaccatactctgcaatgttgcctctggcccatcataatgcacaaaggcagataagcaaaaggacaaggacaagtccattgaaaatacatttttcaatattaaagcaaaagaaaagcatccaggaataagaaacaaagaggacatgcagtcatatatgcaaggtgtcctctacaaagataaagaatgccccaaacccagttgtcaagatcactggcagggactcctgggcccacatgctcttcctaaacaacccctccatctcctttctcagaactcagcagtaggccttgcctcagatccaaggtcactcggaagaggccatgtctaccctcaatgacactcatggaggaaatgctgagagaagcattcagatgcatgacacaaggtaagactgccaaaaatcttgttcttgctctcctcattttgttatttgttttatttttaggagttttgagagcaaaatgacaacacccagaaattcagtaaatgggactttcccggcagagccaatgaaaggccctattgctatgcaatctggtccaaaaccactcttcaggaggatgtcttcactggtgggccccacgcaaagcttcttcatgagggaatctaagactttgggggtaagtcagttgccttccatcccatgtcgtagggattctctggctgacagaagctgatgcggtataggccacatacagaattcaatccaatttgaagaattgggatccaacctgatgtcttctttatgtctaacacagtgggccaaatcaggggtgcatcagagaagttatcacttagatcacctctgggtgatcttatgtcaccttttggttttggggcttgtatatgcaggggtcccccatcccagtccattgccagaatcccaggcatacctgctccctggaaatgccccatgtggttgaggaaacagattcgaacaagaaaaagacaaaattcttggcacctccactgcttcctttaggcattcctcacagctccaagtcaggagccagagcttccaaccttgtctttgcctgctagcagtgatgatttcagctcatccactgctgcctctgttctctccccaggctgtccagattatgaatgggctcttccacattgccctggggggtcttctgatgatcccagcagggatctatgcacccatctgtgtgactgtgtggtaccctctctggggaggcattatggtgagtaaaagaatagcagccatttgggaaatggtgcagacaaaaatgttaaaaggctccacagggatatgccagattatttctgtgttgagggaaatatatgagtaggaaatattattgggttaaagtaattaagaagacaggttgaccaaattgagtataaatcccatggttgagagtcagtggtcctgtttcatgtgaattcagagaaaggggccctgcatggatctcacagggactgtccaaagcaagaactctccaaagtcagttctggtggggagggtggccctagacatttagactagatagcaagatgttttggaaagcaagaggcagcaggaacatccacttccatctaccccttcttgcttacaattctgtttggttactatggtacctggtgaaacctgtcccatcacaagtcagtctcattttgcttatcgacagagcagcactcttttggctgttttacgtacatgttttccaaatctgtaaccctgtctgggtgtggcacataggacagtgatgtttatttccccgtgatacttttcatagttgccactataaaagataagtccaggattaaaattttccaaacaagtagagatgggttagaacaagagtttcctccattctacagcctgaatgtgagaaaaggaagatgagcaatagtcatcatcacttcctgtaacagccaatgttttcatggagtgcctgtgccattcaggtcaagtatttccttctgcatcagttcactcttcagagggcatcagagtcatttatgtcactgtgaaccccaaagggcagttccacaagttaaaaacaaagaaaaactagaaataaaacttttaaatttatggtatgagtattaattgatgaggaaatttgagttctgtctctttggtcttactatattcctagtcacagatccccagatgattgagtaaaaggcatgaatttagtgtcactgagcctgaataaaggaggaatatgacagctgaaaaatgaatacaactgataaaaatgggtggatggttgtgtgaaagttgctgaaagtgtaggcttctttctgaccagttatcaatgttaaaaagtgatctccctctctcctctatctcctgtcttgcccaccccctctccatctcccccacctctcttttttacagtatattatttccggatcactcttggcagcaacggagaaaaactctaggaagtgtttggcaagtaaccatatgtccttctttcccacatgtcagagaagtacctatttttttcggttaaaaactgagacccttaaaaagccaaggtatcacagcctctcagccctaaaaagcaaagaccctccacaatgttattgtgattttatttatgaaaaacttagaagcgaggtctatctgaagtatgttcatgggaacagaactaaaagcagatccatgaaaaccatacctacagtcttaagaacgttaaatgctgtgtgaaaataatagacctttctgaaagccctatcatttctcccagatcaccatttaggaaaattatctgatcaatgtcatgattgattcaaattctagctaagccattttttggccgtaacattgaacaagtcagtttacctctatgttcctgagttttcacctagaaaggaagggtaacagtccttgctaccatgtgacgtccaatggagatgaaaggcagtagagtgtgtgatggtgcttcacaggctataaagtactacactgtggtcttgcccataaaacccctagggactcatctagatccagaggaaactggcctgcagagctgctgatgctgtatggatgaaaagagtttagcagcaagttcgctcccaaaaaattcctcccccaacactgttactaaactgtgtcacttgcataatcaatgagggaatgggtggattgannnnnnnnnnnnnnnnnnnnnnnnnnnnnnnnnnnnnnnnnnnnnnnnnnnnnnnnnnnnnnnttatattttcctgtttcaaccttttatcatccctgcaagggtagaacattcacactgatattttcttacctatgctacccaaagacatcagccctaattgtattttggaagatagctgactggggctgattgcaacctatgtcagcaggaatagatgttgttactgttgttgcttctgctttttttatttccatttatttgatagtacagatctagagggttctatctgaaccttcccaacctatacttcataataccatcccactaaagtgtgatacaagaaacttcttcactctcttccctctacctatttatgaaggcagataataaactggataatatttatcttcacttattcaacaaacatttattgagtgcctactaggatggtggcagtggcagtgaaggaaatgcaaggatacaagatatagaatcaagggttactcttagaatttttgctttataaaacagatggatggtgaatgagatagggaagactgagaaaagaacaggatagagacatgattttattttatagtgacaaagaggctaaaaacaactgagagaacttcagtatatttagttgtagttgctttgtgagtcagggcagttgcatttggaattccctcccagattatgttttccaaagggaaatcaaacccaattaataaatctgtgtctccatttcaggtcaaaggaaaaatgataatgaattcattgagcctctttgctgccatttctggaatgattctttcaatcatggacatacttaatattaaaatttcccattttttaaaaatggagagtctgaattttattagagctcacacaccatatattaacatatacaactgtgaaccagctaatccctctgagaaaaactccccatctacccaatactgttacagcatacaatctctgttcttggtaagtgttcttggtaagtgtgagattggatttctctccagggaggaaggatgacttgtttattatgagcatgaactctggatccagaccacctgagtttgctagttactgtctgtgtggctttgggaaagaattttaaccacactgtgcctcaatttcttcaactgtaaaatggggatggtaacactatttatctaatagggttgttctgaggaataaataagttaatatatacaaagcatttagaacagtgtttggtacacagaagtgctatataagcattggctttaacattaattattctcaacatcattaatggcattaatatttaccattatattaactaagatgagcatagaagaaattcctaagatgttatgaatatcttttgcccaaggacttttaaatgtagagtttgaaagagataaaaaaaaatgcatctcccaaggatgaagaggtctcctaggcatgatgccacaccaactaaggctgaatacaatttaatttgagactcattacttattctttcctatacagaattgattcttcaactgattattcataccttactttctatcagcaatacacattaaccatctgttgtgtgccaaaagttgtgttaagagttagggttataaagatgctgtctcctgtactagcagttctcacagctattcattacttgtctaaagaattgatctcttaatcgttcaattatagtcaacaataacttactgaacaccaacaatgttctttgtgccattattacattttcaccttcattcttctgttgtttttcagggcattttgtcagtgatgctgatctttgccttcttccaggaacttgtaatagctggcatcgttgagaatgaatggaaaagaacgtgctccagacccaaatctgtaagtagtagcccctctggccaaaacctccctctagaaaatccacatccacaaaggatcatttatggagaatgtaatctgatgagttgttgaaactaggagcttgatttaaaaaaaaaaattggtcttggcatatttctagaaagcaaataatatgatgtcttgaaatttgaaataagtctgtagttagagcctacagttctatattctgtgcgtcttttttttttttttttttgagacagagtctcactttgttgcccaggctagagtgcaatggcgcgatcttggcccagtgcaacctctgcctccgggttcaggcgattctcctgcctcaccctcccgagtagctgggattacaggcacccgccatcatgcctggccaatttttgtatttttgtagagacgggggttcaccatgttggccaggccagtcttgaactcccgacctcaggtgatcctcccacctcagcctccgaaagtgctgggattgcaggcgtgagccaccatgccccacctctgtgcatcttcttattaaccttccctgctgcttgacttcaggcttccatcctgatttcatgattccatatacagtgtgtaaaagcaagatggttgaaggttgaaggctaagtcactagttctttggtttcatttttcagtattcccctcttccctccttttcacctaattcctcttccaaaacaacaggttaaagggctccacaaatgggaaataaaaacagaccaataatagatatattactaactgcttcagaaccagactgttagatttagaatttagaaatcatcgctaattacttcattttgcatttaaagaaaaatagtatcaaagagagaaaattattctcccagagttatattcactaaaggcaaatcagaacgaaaatctaaactcctctattactgcaatgttcttttcccaataccacgtggtcattccaggcactgtggtcaatgtctgctgcccttgaagatttattcagacttgagttttaataaatgacttgataaggatataagcacctgcaaaaaaattttggcatttaaaggcatataataaatgacataagtagcataaaaaccaggaggtatttgataaatgtttgtggagattgttgacaaaggtgtcagtggtaaaagtaaagaatggtttgtttaattttctgttttagaacatagttctcctgtcagcagaagaaaaaaaagaacagactattgaaataaaagaagaagtggttgggctaactgaaacatcttcccaaccaaagaatgaagaagacattgaaattattccaatccaagaagaggaagaagaagaaacagagacgaactttccagaacctccccaagatcaggaatcctcaccaatagaaaatgacagctctccttaagtgatttcttctgttttctgtttccttttttaaacattagtgttcatagcttccaagagacatgctgactttcatttcttgaggtactctgcacatacgcaccacatctctatctggcctttgcatggagtgaccatagctccttctctcttacattgaatgtagagaatgtagccattgtagcagcttgtgttgtcacgcttcttcttttgagcaactttcttacactgaagaaaggcagaatgagtgcttcagaatgtgatttcctactaacctgttccttggataggctttttagtatagtatttttttttgtcattttctccatcaacaaccagggagactgcacctgatggaaaagatatatgactgcttcatgacattcctaaactatcttttttttattccacatctacgtttttggtggagtcccttttgcatcattgttttaaggatgataaaaaaaaataacaactagggacaatacagaacccattccatttatctttctacagggctgacattgtggcacattcttagagttaccacaccccatgagggaagctctaaatagccaacacccatctgttttttgtaaaaacagcatagcttatacatggacatgtctctgccttaacttttcctaactcccactctaggctattgtttgcatgtctacctacttttagccattatgcgagaaaagaaaaaaatgaccatagaaaatgccaccatgaggtgcccaaatttcaaataataattaacatttagttatatttataatttccagatgacaaagtatttcatcaaataacttcatttgatgttccatgatcaagaaagaatccctatctctattttacaagtaattcaaagaggccaaataacttgtaaacaagaaaaggtaacttgtcaacagtcataactagtaattatgagagccttgtttcataaccaggtcttcttactcaaatcctgtgatgtttgaaataaccaaattgtctctccaatgtctgcataaactgtgagagccaagtcaacagcttttatcaagaatttactctctgaccagcaataaacaagcactgagagacacagagagccagattcagattttacccatggggataaaaagactcagactttcaccacatttggaaaactacttgcatcataaatatataataactggtagtttatatgaagcagacactaagtgctatagacactctcagaatatcatacttggaaacaatgtaattaaaatgccgaatctgagtcaacagctgccctacttttcaattcagatatactagtaccttacctagaaataatgttaacctagggtgaagtcactataatctgtagtctattatttgggcatttgctacatgatgagtgctgccagattgtggcaggtaaagagacaatgtaatttgcactccctatgatatttctacatttttagcgaccactagtggaagacattccccaaaattagaaaaaaaggagatagaagatttctgtctatgtaaagttctcaaaatttgttctaaattaataaaactatctttgtgttcttttctgcaacagatgattccaacatgggtgtttgtctattcttctttactcttgaaacattagaccatgggaggctcttacagccttgagttgatatttatacaacccaaatctaggtttgaacggtgaggtgtcaggtcatcaaatattcatgtctatatagtcttacacaggttctcaaaaaaaatgttcatgggataggtcattgataatggattccttattctgagaactccagacgactgaaatatatgagagaaggaaaaggacatagtaggagcaggcctgagaaaaaaatgaaagtcagaaatctttaaaaaaatacaagatcttatttctatcttattttttctcctcttctgaaatatatatgaggattcctctccaaacccatggtttctctaagaattttgagtcatttgtatgacctcaaataattagttttagctgacctcacataactccttataataggagacatctttaatgtctgctattaaagaaggatgaaaattcctatgaccttctccccgattatccctttggctatatagagtcaaataataacattgaccaatagtaaacatgctttgccaagaagtagaagatatattctctagccttagtttttcctcccaatttgcatttttgtaaaaataatgttgtatccacaaaggaaataaactttaaaaacccaagtgcactcattgactaggaggctgacgtaacttattttcattttcttctggttttcttataatctttgtttaaaataaggtgataaaccatcccagtttgtctgagtctgagggattacttgtttggaaaattttaatcctggacttatcttttatagtggcaactatgaaaagtatcacggggaaataaacatcactgtcctatgtgccacacccagacagggttacagatttggaaaacatgtacgtaaaacagccaaagagtgctgctctgtcgataagcaaatgagactgacttgtgatgggacagttc

SEQ ID NO: 74 - DNA, 10100 bp, homo sapiens
  genomic_DNA (1)..(10100): n is an undetermined nucleotide (dATP, dCTP, dGTP, or dTTP)
  initial_coding_region (1918)..(1973)
  coding_region (2844)..(2973)
  coding_region (3488)..(3622)
  coding_region (5944)..(6000)
  coding_region (6552)..(6710)
  coding_region (7116)..(7214)
  coding_region (8710)..(8805)
ggaaaccccccccaaaaaaaaaaaaaaaaaaaaaaagaaaagaaaagaaaaagaaagataaaatgaaaattcgtggctgggcgcagtggctcactcctgtaatctcagcactttgggaggccgaggtgagtgagtcacctgaggacaggagttcaagaccagcctggccaacatggtgaaaccccttctctactaaaaattcaaaaaaattagcccagtgttgctgcacactcctgtagtcccagctactcgggaggctgaggcaggagaattgcttgaatctgggaggcggaggttgcagtgagccattgccctccagcctgggtgacagagtgagactctgtctcaaaaaaaaaaagaaaaaaaaagaaaatagaaaattatcgaggctatcattttaattttaagtctgctctcaaatgttaccttgtctgggaattccttccctgaactctacatatcccctatcaggcagaattgttttacccttctatgtgttccaacatcctctggcctccaacatattgggtaataatatatcatttatctttgttctattctgcttgattgtggactagaaggacctgggattttggcattcatctgtgcatgcacagtgataagggcagtgcctggcatggaacactaagttctttttggatgaacgtataagtgagaaagttctattccttaattccaatagcaccttgtttaggtccaccaattcctgaagacaccatgggaagatgacacctgagttaataaacttagatacaaaagctataccaatatgtcttttagtatactctgtttatgcaaatatcttagtttcctgcaaaaagattttctttttcaccccccacccccaccaaaaaaaccacacatgattagaggtgtgatttttagtatcttaaatattattgaaagccattcaaggttatgtttataattaaactgaaataaaagagattaaaaccttctctgaattttatctgtactgattttgctatggtctagctagttatggtatttcaatgatcacatggtttagccctaattctaatttaggcatactactcaatccaatgctgtttagatttgctcatgggatttgttataaagttcatgtctctcagtgttctcactatcccattcttgccactgtaaagatctaagcaccatcagtctaataatttagcagacaatggagtcttcttagcttttacacactatcaggtatggttcacagcagttagaatgcagcctgttgtatttccaagaccatctgctgcagcgaatcatgtaaacagtttccaaaagacggaaagagagagaaagatgatagatattaaagtcagagatggatctggagatttagagactaacacatactcactcacatacaacagcacttcagttttgggtctatgtgtgaaaccaagcatgccttaaacaaggaagacaagcttttcaaaggtgcaattggataacttctgccatagaaatggctgaattgggacacaagtggggacaattccagaagaagggcacatctctttcttttctgcagttctttctcaccttctcaactcctactaaaatgtctcattttcaggttctgtaaatcctgctagtctcaggcaaaattatgctccaggagtctcaaattttcttatttcatattagtctttatttagtagacttcttaatttttctattcatcacaagtaaaagcctgttgatcttaatcagccaagaaacttatctgtctggcaaatgacttatgtataaagagaatcatcaatgtcatgaggtaacccatttcaactgcctattcagagcatgcagtaagaggaaatccaccaagtctcaatataataatattctttattcctggacagctcggttaatgaaaaaatggacacagaaagtaataggagagcaaatcttgctctcccacaggagccttccaggtaggtacaaggtattatttttttctaccctcagtcacttagtggcaggggaagtcatagtcacggtgcttaggagatgaaactttattgatttaggcatggatccatctagtttaattaatatattgggtatgaggaagctacttgctgtactttccatgtggttctctctccctggagaggaacatttttactcagcttgcaaactggaaatagattttctcacattagaagctcattttctgggtatgagacaggagagttcatactgtgtatgtagatctctggcttctgggtctgacatgtgctgagggacacatatccttcacacatgcttttataaatacttgataaagtaacctgcttcttgattggtctttataatccataagctgtgggatgcttctctgaagatgaaaatagtaatagagtcccatctagctattcaaagccattccttcattgtattctgtgcacatgaagttggggtttgttactgacaaaatatattcagatacatttctatgttaaaaggattgtgagatgcataggtaaatgtgtttattttcagttttacttgtcaacatagatgaatgagaaagaacttgaaagtaacactggattaagaataggaaaatttggcatggattttgctccattttgtcccatctaatcacttggatagtgttcaggtgttcttggtcagttacttggatgctctgagctttagtttcttggtgattacaatgaagatttgaattacaggatggctttgaaaaaataaacaaaactcccctttctgtctgtcgagaatgttgcacagggagttacagaatgttctcatgactgaattgcttttaaatttcacagtgtgcctgcatttgaagtcttggaaatatctccccaggaagtatcttcaggcagactattgaagtcggcctcatccccaccactgcatacatggctgacagttttgaaaaaagagcaggagttcctgggggtgagtgagcctcctccaactttgactagagtaagggttgggtctagaaaagaatattgagttgcatcaactgttttcccacttggattcatgagaggtgttaggtcctttaaaaaacatggtagataaagagttgacactaactgggtccttttgggaagagagaagcatttcctcataaagactttaaattgctaggacgagaatggccaacaggagtgaaggattcataatctttatctttacttagatgtaaagaacaattactgatgttcaacatgactacgtacataaaggcgcatggagaaaagtattggccttccatgcattaggtagtgcttgtatcaattcttatagtggctagggtatcctggaaaatcttacgtgtggatcatttctcaggacagtctaggacactaacgcagtttctcatgtttggcttctattattaaaaaatgatacaatctcgggaaaatttttttgattttcatgaaattcatgtgtttttctataggtaacacaaattctgactgctatgatatgcctttgttttggaacagttgtctgctctgtacttgatatttcacacattgagggagacattttttcatcatttaaagcaggttatccattctggggagccatatttgtgagtatatatctataattgtttctgaaataacactgaacataggtttttctctttctcagatctaaccagttgtttattcccagtattaacatgatatttataattcttaattataaattatatgtgagcatatataacatagatatgctcattaacaacaacaaaagattctttttacaattaacggtgggttaaacatttagcccacagttttatcccatgagaaacctgaatctaatacaagttaaatgacttgcctaagggccacttgactaatagtaattgaacctaaactttcagaatccaactccaggaacatacttctagcactattcatcaataaagttatatgataaatacatacaactttatctgtcaactaaaaataacaacaaaggctgggcatggtggctcacacccgtaatcccagcactttgggaggctgaggcaggtggatcacctgaggtcaggagtttgagaccagcctgaccaacatggtgaaacctcatctctactaaatataaaaaattagctgagtgtgatagtgcatgcctgtaatcccagctacttaagaggctgaggcaggaggcttgtttgaacctggaaggcagaggttgcagtgagctgagattgtgccattgcactccagcctgggcaataagagcgaaactctgtctcaaaataataataataataatagaaaataaagttgtcttcatgaaaaatgaggaaagagattgctggggtgagaaacattaagatcaaagggcatatggtgaccttctatgccctagaaactcttttaggtattttctcctggtatctcttttactcatcgttctatctggaaaaataggtggatgagtgagataataaggtatataactttttaaaggtctaattgacatataataaattgcaagtatttcagatgtacaatttgctaaccttgacacacatagacacacatgaaaacatcaccacattaatacaatgtatgtatccatcatttccaaaagcttccctgtgtatctttgtaactctttcttcctccctccactccttgtcctctcgttcccaagaaaacattgatctgctttctgtgaatataaattaacttacattttttagagctttatataagtatgttctctttactgtttgtcttccttcgctgcacagttattttgagattcttcaagttttttctttatatcgatacttcattcacaagaatatattttaattctagactatgtcacattgactttgtagtctgctaaatccttagtgctcagatgacttgttcaggactctccttgaacctgtacctctgttataattgaaacttgtctctactgtctttttatttcaaacacagcttatgaggtgtctctcaacccatcaaactcacaatctgagtctttaggagattgctttgaatttgtgctattgacttatatttatatcaaatatgtaaatgtttggtaaaaatatcatcatgtacattttcataattactctatattcacatgatatatgtcagactctggaaatatgcatgccacagacacgtgtttcttgcctaaaggggctgatggaagacgcacatacaaatagacgattgcaatagaatgagagtggtggtctaatcgattcatgccctgatgttgctggacgttgctactccaagagtaacccctgcattgtcagggttagcatctcctggaagcctcatgtaaatgaagaatttcatgctccatccaggacctaatgaataagaatctgcattttagcaagaccctcatatgattcatatacactttttttttttttttttagatggagtctcactcttgtcgcccaggctggagtgcaatggcatgatcttggctcactgcaacctctgcctcccgggttcaagtgattctcctgtctcagcctccctagtagctgggactacaggtgcatgccacagtggctggctaatttttgtatttttagtagagacagggtttcaccattttggtcaggctggtcttgaactcatgacctccggtgattcccccgcctcggcttcccaaagtgctgggattacagacatgagccaccacacccagccttattcgtatacacatttaattctgagaagcactctatagaaaataagaataagaaaatattgggctcacaggtgacattaataagtaactttatcgagtaccccaaatgttacctatgtttggaagatggggttaaaaaggacacattgaaaacaagaaactcattgtggcttttttttcctcctttttgaacagttttctatttctggaatgttgtcaattatatctgaaaggagaaatgcaacatatctggtgagttgcccgtttctgtctttgtccatccttgaaaagataagaagaacagagttttaagagtcttaagggaaacacatctttgtctcctatattacttgtgaatgtggatatatgattttgtttcaatctattttgtgtcctaaggctttttgcaacagaagttggatataatcattagaaacataaattgtaccatttaacatacaatgaagtttatgtttaccttgacgtttcttctaaaaaaagtgtcctcacaccggcattgtccttgtaggcatattcacatgatcaaataaataattagttttcaattaaggagaatatttgaggaaagaccgtacgtgttcatgtggttcctgaaggcagtccagtgagaaagtaatatatgctcattaaacaatgcggacattttcagggtttccctttttaaccaaaatttggaagcaatgtggaatttactggatgcatccagccctgaaatgaagataggtttattgaatgtgccagcaagtgcaggcccaggtctgagtgttcttcattattatcaggtgagaggaagcctgggagcaaacactgccagcagcatagctgggggaacgggaattaccatcctgatcatcaacctgaagaagagcttggcctatatccacatccacagttgccagaaattttttgagaccaagtgctttatggcttccttttccactgtatgtatttttttttgtgtgggaagactaagattctgggtcctaatgtaagtaagaagccctcttctcctgttccatgaacaccatccttttctgtaacttctattacacagtatagtggttctgtaagttcacacagcccagggagatgctggctgcccactcccctcaacccaggcaaattcctcggggttaaagttatctactgcaagtgacgatctctgggtttttctgtgcctgtgtttgtgtgtgtgtgtgtgtgtgtgtgtgtgtgtgtgtatgtgtcactttaaaaggactggtcagatggtagggagatgaaaacaggagatgctataagaaaataaacttttggggcgaataccatgtgactctttttgtttgtcatttgttgctgttcaataggaaattgtagtgatgatgctgtttctcaccattctgggacttggtagtgctgtgtcactcacaatctgtggagctggggaagaactcaaaggaaacaaggtagatagaagcccgatataaaatcttgaatgacaggttaacgaattggagctttattccttaaaaatatggcctgggttttctgaaacatttcttccagaaaatagtttctccaagttttattactttggtttacaaatctcacattttaaatcacattttatacccataagtagcacacatttcataatatatccctctgaatgagggttgggataataggatctgtataatgttagaaaatgccttaaagtgtgtggagcatgagagatggatgtgcagaaggcttgtgaggaaaccacccaggtatctggccttgttttctgccccagaagtagccgcctattcctgtttctgttttattcctttgtttcttgacttttcctttccaacttgctctaaaacctcagttttctttcctttctgattcatgactaccaaatgtttccacttgcctcacccgtccattacacctttgataagaaccaccagcaccttgtgctcatgtacttgcccatgtctgatggaagaaacatactctctccatctgtccactttcctgaggcattcaagtctagccaccttttaaaatcactctcctccaggctgggcacggtggctcacgcctgtaatctcagcactttgtgaggctgaggagggcggatcacttgaagtcaggagttcaaaaccagcctggccaaatggcaaaaccaaatcttcaattaaaaccaaatcttaaaccaaatctctactaaaaaatacaacaaaacaaaacaacaacaacaaaaacagaaaaggaaacattagcccagcgtggtggcaggtacctgaggttccagatacttgggaggctgaagcaggagaatcgcttgagcccaagagatggaggttgcagtgagccgagatcatgccactgcaccacagccagggtgacagagccatacttcccagcacattgggaggccaaagctgaagaataatttgaggtgaggatttggagaccagcctggccaacatggtgaaactccgtctgtactaaaaatataaaacttagtggggcatgggggcacacacctgtaatttcagctacttaggaggctgaggcaggagaattgcttgaacccgggaggcggaagttgcagtgagccaagatcgtggccactgcactccagcctgggtgacatagtgagattctgtctcaaaaaaaataaaagaaatttaaaaaatcactctcttccaaagatagataaataagacagcagatatactaaggaataacctcaccaacttgtcattgactgacatgatttcttttgggcccacttggccagctagtctggtttggttttctggaaatgaaagaaataatcagagtttaatgacagagagcgtgagacccagaaagacaaaagtagatgaggtaagtctcttgagcgagacttctagggatgggaaatttgtggtgattgatatgaaatgatttttcccttatcaggttccagaggatcgtgtttatgaagaattaaacatatattcagctacttacagtgagttggaagacccaggggaaatgtctcctcccattgatttataagaatcacgtgtccagaacactctgattcacagccaaggatccagaaggccaaggtcttgttaaggggctactggaaaaatttctattctctccacagcctgctggttttacattagatttattcgcctgataagaatattttgtttctgctgcttctgtccaccttaatattctccttctatttgtagatatgatagactcctatttttcttgttttatattatgaccacacacatctctgctggaaagtcaacatgtagtaagcaagatttaactgtttgattataactgtgcaaatacagaaaaaacccacggtggttgaaacttgagttaaacctttgaccgcttgaaaaaatttggtttttagggtttttttttttttttagcattcttaatagttacagttgggcatgatttgtaccatccacccatacccacacagtcacagtcacacacacatatgtattacttacactatatataacttcctatgcaaatattttaccaccagtcaataatacatttttgccaagacatgaagttttataaagatctgtataattgcctgaatcaccagcacattcactgacatgatattatttgcagattgacaagtaggaagtggggaattttattaagttactcgttgtctggggaggtaaataggttaaaaacagggaaattataagtgcagagattaacatttcacaaatgtttagtgaaacatttgtgaaaaaagaagactaaattaagacctgagctgaaataaagtgagtggaaatggaaataatggttatatctaaaacatgtagaaaaagagtaactggtagattttgttaacaaattaaagaataaagttagacaagcaactggttgactaatacattaagcgtttgagtctaagatgaaaggagaacactggttatgttgatagaatgataaaaagggtcgggcgcggaggctcacgcctgtaatcccagccctttgggaggccgaggtgggcagatcacgaagtcagtagtttgagaccagcctggccaacatagtgaaaccccgtctctactaaaaatacaaaaaaaaaattagctgggtgtggtggcagtcacctgtagtcccagctacttgggaggctgaggcaggagaatcgcttcaacctgggaggcggaggttgcagtgagccgagatcgcaccagtgcactccagccttggtgacaatgggagactccatctcaaaaaaaaaaaaaaaaaaaaaaaaaataaaaatttacaaattttaaaatggggggaaaatt

SEQ ID NO: 75 - DNA, 22884 bp, homo sapiens
  genomic_DNA (1)..(22884): n is an undetermined nucleotide (dATP, dCTP, dGTP, or dTTP)
  misc_feature (9562)..(9621): n is a, c, g, or t
  initial_coding_region (12238)..(12393)
  coding_region (13544)..(13681)
  coding_region (15338)..(15394)
  coding_region (18027)..(18188)
  misc_feature (18413)..(18436): n is a, c, g, or t
  coding_region (19594)..(19695)
  coding_region (20223)..(20249)
tttttgttctgccatagtttactgagaatgatgtttccaatttcatccatgtccctacaaaggatatgaactcatcattttttatggctgcatagtattccatggtgtatatgtgccacattttcttaatccagtctatcattgttggacatttgggttggttccaagtctttgctattgtgaatagtgccgcaataaacatacgtgtgcatgtgtctttatagcagcatgatttatactcatttgggtatatacccagtaatgggatggctgggtcaaatggtatttctagttctagatccctgaggaatcgccacactgacttccacaatggttgaactagtttacagtcccaccaacagtgtaaaagtgttcctatttctccgcatcctctccagcacctgttgtttcctgactttttaatgattgccattctaactggtgtgagatgatatctcatagtggttttgatttgcatttctctgatggccagtgatgatgagcatttcttcatgtgttttttggctgcataaatgtcttcttttgagaagtgtctgttcatgtccttcgcccactttttgatggggttgtttgtttttttcttgtaaatttgtttgagttcattgtagattctggatattagccctttgtcagatgagtaggttgtgaaaattttctcccattttgtaggttgcctgttcactctgacggtagtttcttttgctgtgcagaagctctttagtttaatgagatcccatttgtcaattttggcttttgttgccattgcttttggtgttttagtcatgaagtccttgcccatgcctatgtcctgaatggtaatgcctaggttttcttctagggtttttatggttttaggtctaacgtttaagtctttaatccatcttgaattaatttttgtataaggtgtaaggaagggatccagtttcagctttctacatatggctagccactttccccagcaccatttattaaatagggaatcctttccccattgcttgtttttctcaggtttgtcaaagatcagatagttgtagatatgcggcgttatttctgagggctctgttctgttccattgatctatatctctgttttggtaccagtaccatgctgttttggttactgtagccttgtagtatagtttgaagtcaggtagcatgatgcctccagctttgttcttttggcttaggattgacttggtgatgcaagctcttttttggtgccatatgaactttaaagtagttttttccaattctgtgaagaaagtcattgataacttgatggggatggcattgaatctataaattaccttgggcagtatggccattttcacgatattgattcttcctacccatgagcatggaatgttcttccatttgtttgtatcctcttttatttcattgagcagtggtttgtagttctccttgaagaggtccttcacgtcccttgtaagttggattcctaggtattttattctctttgaagcaattgtgaatgggagttcactcatgatttggctctctgtttgtctgttattggtgtataagaatgcttgtgatttttgtacattgattttgtatcctgagactttgctgaagttgcttatcagcttaaggagattttgggctgagtcaacagggttttctagatatacaatcatgtcatctgcaaacagggacaatttgacttcctcttttcctaattgaataccctttatgtccttctcctgcctaattgccctggccagaacttccaacactatgttgaataggagtggtgagagagggcatccctgtcttgtgccagttttcaaagggaatgcttccaatttttgcccattcagtaagatattggctgtgggtatgtcatagatagctcttattattttgagatatgtcccatcaatacctaatttattgagagattttagcatgaaggttgttgaattttgtcaaaggccttttctgcatctgttgagataatcatgtggtttttgtctttggttatatcaaatttacaagaaaaaaaaaccctgtcaaaaagtgggcgaaggacatgaacagacacttcttaaaagaagacatttatgcagccaaaaaacacatgaaaaaatgctcaccatcactggccatcagagaaatgcaaatcaaaaccacaatgagataccatctcacaccagttagaatggcaatcattaaaaagtcaggaaacaacaggtgctggagaggatgtggagaaataggaacacttttacactgttggtgggactgtaaactagttcaaccattgtggaagtcagtgtggcgattcctcagggatctagaactagaaataccatttgacccagccatcccattactgggtatatacccaaaggactataaatcatgctgctataaagacacatgcatacgtatgtttattgtggcactattcacaatagcaaagacttggaaccaacccaaatgtccaacaatgatagactggattaagaaaatgtggcacatatacaccatggaatactatgcagccataaaaaatgatgagttcatgtcctttgtagggacatggatgaaattggaaatcatcattctcagtaaactattgcaagaacaaaaaaccaaacaccgcatattctcactcataggtgggaatggaacaatgagaacacatggacacaggaaggggaacttcacactctggggactgttgtggggtggggggaggggggagggatagcattaggagatatacctaatgctaaatgacgagttaatgggtgcagcacaccagcatggcacatgtatacatatgtaactaatctgcacattgtgcacatgtaccctaaaacttaaagtataataataataaaataaaaataaagtctctcttgccataaaaaaaaaaaagaatgtgttcatgtagaactcaatggttacctttcgtgaggagaatgcaaatcaaggcaaaagaagattaaagagctgtaatatttcacatgaagcccatcttgcactatagaaaatgtacttatcaggatgaaatcccattaaaatggctgtcaaaaatgaaatctgtttaactccaaactaagatacaattttacaccctaaaataaagtacataggccaccctagtagaagaggtgatctttcttagagaaatgcatttgttttttcctatcttatttccaactatctcgttataaaggtcttttagacatacccagtagttctacaatctggcttcacattagcgttaccttgggacctttaaaaaatgtttgtgttgggctgagtgcagtggctcatgcctgtaatcctagcaccttgggagtttgaggcgcgtggattacttgaggccaggagttcaagaccagcctggtcaacatggtgaaaccctgtctctactaaaaaaaatagaaaaattaactgggcatggtggtgtgcccctgtaatcccacctactcaggaggctgaggcacaagaatcgcctgaacctgggaggcagaggctgcagtgagccgagattgtgccatggcactccagcctgggcaacagagtaagactgtctcaaaaaaaaaaaaaaaagttcaccttcatgttgggttcatgacaaatatcctgatttaatgtcttataaacttcccagaagattccactaggtagttgaaagtagaactgttgtattagcattttctatctaggctatttccatgtttaccaataaatgacatgataaattcttccagttttcttaggacctctaaaacaacagtgccttcattcaaatgctaagattggatttctagtccattttcctcgtttatttgaaaacacagcatgaggtcaaaacaagaatgaatcaaaggtagtttctgattgttggttttattttatttgatggctcattatttcaagacctcttggaacaacaatccttgtccgtcttaatcttttattaatcttacaattatagtaactaatgccatttcaacgtgatttcaacttgtgacttttgcaacattataaactggtaaattatgaattaaacacgtttaatgcaccccaaagtcaaaaaccttaggtggttaagtgttttaagagcttatacatgtgttaagatatataaaggtactgcttcatgaagaatgtgattttaatatgtacacacatgggcatgagtgtgtatgggggggtaaaacagacagtgcaagcaataatatttagtaagtagataagaccagcaagtcttgagaaatatattgctttttagtcaaatggggcacttgtaaatgaatagctagactataggtgaattcactcgaagatttccttttccttttggaaatttgctacttgagttttgaacttgattattctttaaggtatttcagcactgaaagctagtcagtctctccttgatcatgtctccttgccattgggaaatattgcatgcaagtggaaaaaaggtctatgaatcttctatttttccctttttaatttgtttaaaaaattttttaatttatttatttttatttatcagccataaaaaagaataagatccagtcatttgcaacaacatgaatggaactggagatcattctgtcaagtgcaataagccaggcacagaaaaacaaacatcacatgttctcacttgtgggatctaaaaaccaaaacaattgaactcatgaagacagaaagtagaaggatggttaccagaggctgggaagggtagtgggggcctgggaggggaggtggggatggttaatgggtacaaaaaaatagaataaataagacccactatttgatagcaaaacagggtgactgtagtcaataactgtacatttttaagataaagagtgtaattggattgtttgcaatgcaatggataactgcttaaggggatggataccccattcttcatgatgtgagtattatgcatttcatgcctgtatcaaaatgtctcatgtacctcataagtatatacactaggtacttacaaaaatggaaaaaatagggggccgggcgtggtggctcatgcctgtaatcccagcactttgggaggccgaggcaggtggatcacgaggtcaagagatcgagacaatcctgcccaacgtggtgaaaccccatctctactgaaaatacaaaaattagctgggcgttgtggtgtgtgcctgtagtcccagctactcgggagtctgaggcaggagaattgcttgaacccggaggcggagcttgcagtgagctgagatcgcgccactgcactccagcctggtgacagagtgagactctgtctcaaataaatacataaaaaataaaaataatttttatgtatttattttactgttcccccctcagctttaatgaggtacagtcagatacatatgttctgcagatctaatgaacagcatgataactgaagttaatactgtactatgtacttgaagtttgttaagagaggagatcttaaatgttctcaccaccaccaccaaaaaaaaaaaaagatgattatgtgatctgatgtgatcagtagattatctgctttgtgttagtgacttcacaatgcacacatgtgtcaaaacatgttgtacatggtaagtatattaaatttttatttgtgaatcttcctttgaaagcagtttctcacaatcattctctaaggaattgaagaaagagctcaatcatttttattatttactttgaactcatgtgaagatcttagttattaagacctttacatgcattctgtcatttatactttataccccaaagtgggcactatgatcttcaacttacaaatgggagaaccgaagtcttagagtttaagtaacttcctttcatggctttttctacagctccaaattcaaaaagagcatgttgaaagcatccactctttcctttcatttcttcagatttctttctcttcttcgctgaaggcattttcttgtcatctctttcttcttcagtattccatttgcaatggttctggataaaacggggagggaaggatcttatctttaccaccttccttttggctatttccttctgacttctgtctctgtctctgtcttctctttcatcagtcccttccttcgctcctaaatgtagaccctggagagccgctgccctagggctcaggtgccagctctcttagcagaagcacctgtgcagaaattttctggcaactgggcccctgctcatttcatattcacaatctctgcccacacactatgttttggtcttggtaactggccctctttctctttcctgtgatcacgtccccactgacgctcctgtttgtaggactaggacctcgctttccttgctgtgaacattcttctctgtctcacagactcccctggggcatggatcaggggctgtgccctcattctttctctcaggcctggccctgtgaccttcataaggattgtggtttgaatcttcacgttacctacttccttactccttgtcacttggctctgatctttctattgcctattttaggacatttatttaggataagcatataatttggccacttttgaaactgaaaggaggccgggcgcgatggctcatgcctgtaatcccagcactttgggaggctgaggcaggtgaatcaccggaggtcaggagttcgagaccagcatgaccaatacggtgaaaccctgtctctactaaaaatacgaaaattagctgggagtggtggtgcatgcctgtagttgcagctattcaggaggctggaacaggagaattgcttgaacccgggaggcggaggttgcagtaagccaagattgcaccattgcattccagcctggatgacagagtgagacgccatctcaataaacaaacgaaacaaacaaacaaatacaaaaaacctaaaaaaaccaaaaaacaaaaaagaaactgaaaggaggggttttaacaatcatattaggataacaggcacacttcgggcttcaccattgtacaaaacagagattttgcacagggcttttccagttaaattttaggaaagctgggtaacatttctataccatagttttctctaccataacatcgggttaatagtagtacctgggtcctgggttattgtgaggatgagatgaattaacatatgtaaagcattcagaacaatgacctgtatgtagtaaccatttaatacatttaaacaataattagcattattattatatctgtgatattgggcaaagtaattaacctctctaagcatgtaagaattgaatgtcatcacgcatataaggtacatagcaccgttgctggcacatcatgtaaaataagtgcctgagtgaccacctccctcctccagatgcttctcttacagtgtgactttgtctcttcttgctatgcacctaacactgttctacctccaacccacaacctcttcccacttgtctacccatattgttgcttgtgtttcctgttccagcaatgtgttaagcaacatctgaaagccagaagacagttatccctcacaccagtttcctaatcatcactaagccctggggaaacacaatggatcagcgaggccccaaatgcagatgtgattagcacactggtcagtcagcccgcaaaacactttcaccaagtcctctaaagtgttgcataaggcaaagataacgttaagtctgtggaggcttccgttatcgggaaaagatgctgtagtgatcttttctgagtgtctcctacttgcgacaaggtggacttgggaggaaagccgtctgccaaagcctgaagcctccaaggtatagattccctctccatagacattcccctttcttttatatctttcgttaaaatgcctcccagtggactactggggatgtctgcaaaggtctctgtttggttgctatgtagaggtttggaacatttaactgtgaacatggcttctctttaggatgtgatgattcctttggagccatgataaaaagtgttagacataataatacagcaatttctttgggaaaatgtgggtatggatacacacacatgcacacgcacctcttaggtacattaaatcccactggctgcacctgagtttgtctgccagctctgataatgaggggtggtctcgatatgcctgaagtatggggtctgcaaagtgcattttagcatagctcaggggacagtggagtgtaatgatagcttgaggttctgatttttagcttctcaaattgctggctgtgtgggcttgggaaagctacttaacttctttgttcctcagcttcttcatctgttagatggaaaggatcatagcagtagtacccattcatctgatgttgtgagaactaaattagtaaacatggataaagcccttagaacaaatgcctgccacatactaagagctggagagatgaacttaactggcagtttcctagaaaatctacatttctctgattttgtgtgtgtgtgtgtgtgtgagagagagacagagtctcgctctgtcacccaggctggagtgcaatggcacgatttcggctcactgcaaactccgcctcatgggttcaaacaattctcctgcctcagcctcctgagtagctgggattacaggcgcgtgctgtcacaaccagctaattttatgtgtttttagtagaaacagggtttcaccatgttagcaaggatgatctcaatctcctgacctcgagatcctcccgcctctgcctcccaaagtgctgggattacaggcatgagccactgcacccggaccatttctctgatttttttaaaaataaataactgatttaaccaaattttagaaaacatagtttgtttcacctggaggctgaaaattctccctgattattttgattatttgaaacaaatcaagttaaataatatggttagatatttgctctcttcagaaatgctcttggagtttcttgagatgagaggctccagtgcttgcagaggtattttccatcatcatttatcaggatggctaccttgggctggaccaaaagtctggttactgattgaacatgtgtgttaactgagtgcttgccatctgatgattctgagctaggcactggagttgcagtgatgagtagacaacgaggtaacagacaagtatccaggcaattaaagctcaggctgattaagtggtatgagaaggaaagttgaggaaattttgagagcaacccaaaggggtgcatgcttcttccagagttggccaggactaaaaacagcatcctggaagtatgacatgtgggctgaaaatcagtctggaagggccgggcgcattgactcacgcctgtaatcccagcactttgggaggctgaggtgggtggatcacctaggtcaagagttcgagaccagcctggccaacatggtaaaaccccatctctactaaaagtacaaaaattagctgggtgtggtggtgcacgcctgtaatcccagctacttgggaggctgaggcgggatcatagcttgagcccaggaggcggaggttgcagtgagctgagatcgggcctctgcactccagcctgggagacagagcaaagctccaactcaaaaaaaaaaaaaannnnnnnnnnnnnnnnnnnnnnnnnnnnnnnnnnnnnnnnnnnnnnnnnnnnnnnnnnnnttcagtctggaaggagagcagaaattatccaggtgaagcttgaggggacttgtctttcaggaatgggggatagcacagaggattgaagacatttgagggtttagaacttctgaaggaagacaaatcaagaaaataaggctggatggagttttgagatagggatgggtgaggggtgaggcaggagacgtaggcgagagattatctggtcataaagcagcacattctccgtattgcatgcatcttagttcattagatatttaatccaaaatacacacaaatttcccagtggataaatttgaagtcttggctttttggctattcttatttatactttttgcagataattacgttaggaacttattcacatagagtttgctttaagctttattgatcttccctcgctcttgggttctgtacagtgttgaacacggggggttaagggttccttgtcatttcacatttatccatacttaaatacatacagaatgtaatttaatcttggcatgaaaatcaatattggtaggaaactttgatgaagagtattggtagcaaaattttatgacatttataataaatgttttatcagtattggtagagaattttatgaatttttatagcaattcccagtgtaataataaaacatggcttgactctcacttttagtcaatgcttagtaaatttgtcatcacacttaaatgagtcatacacacccccagagtagagtatcagaaaggtaaacatcctgaaagtggcgtgtatttagcttgacaaaaaattaagttattagaaaaatggatctagtatataatttgtaacaaagagtagaaattaagatactatactttctttttcaataaaaagcttttattttaggtttacgggtacatgtacaggttcgttatataggtaaattcgtgccacaggggtgtgttgtgcagattgtcacccaggtactaagcctagtactcaatagttatttttcccgatctcctccctcctctctctgataatctccagttgttttgttcccctctatgtgtccatttgttcttagcatttagctcccacttataagtgagaatatgtggtatttggttttctgttcctgtattagctttctaaggataatggcttctacttcatccatgttcctgcaaaagacatgatctcattcctttttatggctgcatagtattccacagtgtgtatgtaccacattttcttcatccagtctacaaatgatggacatttaggttgattctatgtctttgctattgtgaatagtgctgcaatgaacattcacgtgcatgtgttttatggtagaatgatttatattaagatcttattcttaacccaatcgatagttatggcagaatacagcatcattttatgtgtttgtttatggttcatctcatgccatctccctcatcagttataaaagcatataagcattttacaactattttgtgtaggagggtactatgaattaggaagttatcttgcccaacattcagaagtccaatgtaagcattctgtgtgtactttagtgatacatatttttcagctgtaatgattgaggtggttgttttgtgacccttatatatatacaaacttgaagtcctttttgttagaaggcagagtataagttaaaagctgataccacctgttcacaggttgagaattccgtacattatcaaagtcaactctcgcaatgttaatataaaattaaaattattcccatttttacagaagtgaaaactgaggttcccactacaaggtcatgcaactagtaagtgatgaaatctggatttgaattggaatcttccatagtgcttaaactctgaaaactgaggttcccattactaggtcatgcaactagtaaatgatgaaatctggatttgaatttggatcttccatagtgcttaaactctaccatgctatgttggtactcagaaagacgtcttctatatagtactatataatgtggtgatttgaaaaatattggaccttagagtagaatgtttttagtaaaatctgaaatgatttataagccatatgagtttgggtaagtttctcggtctctctatacctcaatttttttcatctgtgaaacgggaataataataatattataacaggattaagtatattaatacattcacagcatccagacagtgcttggcatatagtaataagtactaaataaatgacacctactattattactggaatgtgactaaagccattattcttataaagagaccactgctcagagaaaccatatgtctggttgcccttgactgacttgaagaaaggcagggactatatatcagtgcatgcaaaatgagaaagaaattgctctttaccattccaaagttaagtgaagcaccaaggcctactacaatgacccgatgatgtctactactccaaggcaagacagaattgaatattgtacaaactctgttactctgcctggtgtcccatttgtggagagtcattgtaatgtatggacagaattgaacccttctgtaacactcaaaattttagtagctagtggaaaaagggaaagcatgaaggctttggatttcttttctatcacagccataaacaaccccaatggcctcccacgaagttgataatgcagagctggggtcagcctctgcccatggtaccccaggcagtgagacgggaccagaagagctgaatacttctgtctaccaccccataaatggatcaccagattatcagaaagcaaaattacaagttcttgggtaagtcagccttagtttaaacactgatttaagagggaagaaaataaatacagttgacctgtgaataacgtgcgtttgaactgtgaggattcccttacatgtggatttcttccacctctgtttgccatcccgagacagcaagaacaacccctgctctccctcttcttcctcagtctattcaacgtgaagaggatgaggatgaagacctttatgataatctacttccacttaatgaatagtaaatacattttctctttcttatgatttccttaacgtttttagtttctctagcttattgtatataatatgtcacatacaaaatatgtgataatcgactgtttatattaatagtaagacttctggtcaacagtaggctattagtagttaagtttttgggaagtcataagttttacgtggatttaccaccatgaaagggtgggcattccaaaccccaatgttgttcaagagccaactgtatcatgtagaaaaccttgcttatgctgagaaggaggaaattctgagttatttatcactgacttaataatgattggagaaaagacagggacttcttatagatctggggagcagaaatgcaaaggcattttctcatggtagaaaacatcaaaccttggagaacagattccaagacccttcattttttgttttgtgccttttgaccagccatttgaggaggctgagctctatgaagcttatattctatattttaaatttaaaaattgggttgagagaagggttaaaaattgggttgagagaaaggctgagtaggatatggcttatcctctgtctgccttcatcatattatgatgcaaaagcatgctgggaagagactttgactccatctaccttaccaatcatgtctgttttactgtcctgccactttctgagaggagttcgtgagaatgaacagaaatgtgggggagaggtgaagacaaaatgctgccactggaattggtgtggatagcgtggaataaaaaactctttcagataagctctcgttctgttaatttaggcttgacactttaaccatttcaagcaccgacatctcctttctgaggaaaattaaaatggcctgttttcagtgtccactttagtatatgactgttacgcctttttcccctttcttctttcaggccatccagatcctgaatgcagcaatgattctggctttgggtgtctttctgggttccttgcaatacccataccacttccaaaagcacttctttttcttcaccttctacacaggctacccgatttggggtgctgtgtttgtgagtattcgtactcccctggctatatgttatttcttagataccactgctggagatgtgtttgatgacaaaaatattgtttgtaggttattggaaggttgcatgctgtggttttgatttgcaattcttgatataaacaattagagacgataaactcttttttattttttaatttaattaattacttaattaatttattttttgagacaaagtctcgatctgccatccaggctggagtgcagtggcatgatctctgcccactgaaaccctctgcctccccagttcaagtgattctcttgcctcagtctcctgagtggctgggattacaggcatgcaccaccatgcccacctaatttttgtttttgtatttttagtagagacagggattcaccatgttttccaggatggtctcgaactcctgaccacaagtggtcctcccagcttggcctcccaaaatgctggaattgccaggcatgagccctgatgccaggccaaaaatctctttctgattaagagaaaccacatttgccaagtacaaatgaagtcctaaaaattatcttatatataactatatgttacatttatagatacttaaaaaattgaatgaaaaatgggtattgatgaattgccttgtggtacagcagagagtcctggcttgagagttaagaaatttgtctgctgattactgtctgaaagtcagaagaatcatttccattatctgggtcaacattcaatcagaagaaataggggtgattttaaaatgtattcattcagttttgattatttattacttccctgatggttcatttttaaaaagtgaatgatatgtttgttggccatttgtatatcttcttttgagaattgtctattcatgtccttagcccattttttgatgggattgtttgtttatttcttggtgatttgtttgggttcattgcagattctggatattagtcctttgttagatgtatagattgtgaagattttctcccactctatgggttgtctgtttactctgctgactgttccttttgccgtgcaaaagctccttagtttaattaggtcccagctatttatctttgattttattgcatttgtttttggcttcttcgtcattaaatccttgcataagccattatcctaagtgaagtaactcaggagtggaaaatcaaacatcatatgttctcacttataagcgggagctaagctatgaggatgcaaaggcataagaatgacacaatggactttggggactcagggggaaaggtgggaaggaggtgagggataaaaggctacaaattgtgtgcagtgtatactgtttgggtgatgggtgcaccaaaatctcacaaattaccactaaagaacttatccatgtaaccaaacaccacctgttccccaataacgtatggaaataaaaaaaatttaaaaaataaaatgaataaaactaattgcatggaaagactaaataaataaataaataaataaataaataaataaagtgagcagcatcaagtacaattctgtgtcctaggatgtgaatttaaaagggaggtttgtatgactattgctggatatctgctaattgagggaggaccaagaagaaaatggttgagacttaatattcctttatctgttttccttcctattttcaaacagttctgtagttcaggaaccttgtctgttgtagcagggataaaacccacaagaacatgggtaagtagcacttcctctttttctatgatcagaggagtagaaatatattattcataaacagtaggacagtaagtgtccatgaatacaactgagacactgagtatcatttaatgcacaaaatattagttttcttaacgtgttcagatggtaggtcagcagatcacatacattgtgaggatgcattcctgggatgcttgctcttaatattggtgaacttgaagcttagaaaaagtcttcttgatttttatgtgttgtcaagtttgaccaattctaattatttggaagtaagaactcccaccactaactagtttgacaactgaaagtccaaacttctattctaaacaactgctaagtctctatgatgtgttcttagtgagtcacgtagccactgatactccactttcctactccattcattcactttccctcctccatggatagctattttaccattttattgtatcctcaaacaccaatcccacttctgtcatccttactctctgctgatgatttttctgtctcttctgagaaaactgaagccattagaagggaattttcagacctccactactaatggactagatctgtaccaatgtatttttttcttctagcctcttaccataggaaaattttgtgattttctttaaagctgatctccctacttgagtataagattccattctttttttccccacacaagtgcatcactttaatttttgtctctctgctatatatatatttttcgagtctcactctgtcacccagatgggagtgcagtggtgtggtcacagctcactacagcctccaccttccagggctcatgcaatcctcccacctcagcctctcacatagctgggactacaggtgtgtgccaccatccctggctaatttttgtcttttttttttttttttttgtagagacaggatcttgccatgttgcccaggctggtctcaaaatcttgggctcaagcagtcctcctgcctcagcctcccaaaaggctggggttacaggcgtgagttaccttgccccatctctaatcagcatgtaaacatccagttactgttctcaacttaaaaacaaaacaaaacaaaacaaaacaagaaaaccttgacattatttctccctgctagggacaggcacaatttgtattttccttctgtagctaaactccttcaaaggaatcatcatgttctttctctgatttccatctaccggtttgaatcaaacccacttcaataagactttattttattccctactatccttctgtaactgctgtctttaagatcactgaaaacttccaccctgctaaaacaacggtcaactcttgttcctcatctaacttaagctatgagtagcatttagcatagttagtcgcccactcctccttccaggaatttcctcacttggcttccagcatacattgcttggctggttttcctcccatcttttgctttctccatctcagtctcctttcctggttcctctccttgtctctgaccttttaatgttctggtgccccagagctgaattctttgccacctgctcttctcaatctatacgtacttcttctgtgatctcacacattcttatgacttcaagtaatatctgtatgcccacaaccctgaaataagtatttccagcccaggtgtctctcctgatcatcagactggcatgtaaagatccaaagctcaactcccagtcttcttcctcaaaccttctcctcatgtcagctgatgggaatgtcatccttccagattcccagaccaaacaccttagaataaccaagagtcttctttctttcacaatcctgaatcctatttatcagcaaataatgttggctctactttcaagctattattatatccagttttgaccttttcttatctttctattgatgacatttcatccaatccaccttgtctctcctaattgggcttctagcttttatcgttgaacttctctttgccttgctagaaacagtgatcccttgaaaccataaagccaagtatatcatttatttgctccaaatccttcattggctttgtatttttcttagagttagaaacaagttccttttcatgatctgcagagccccacatgatttggctctctgttaactttccttcttcttcatttcctagtattgactacgtgcctccaacgcccttgacccctttgctgccccagaagattctggcctcaggattttgagtgtttccctaatttcaaggatattcccccagatatcctcctggctggcacccacagctctttcatgcctctccccagtgtcatttctatttaatatcatgaacccccactcctctctttggattcccagattctccttatcccattctgttagcccctagtacttaatcactttcaaaaatattatgtaatttacctatagtatgtttacttttttctttgtttttattgctagaatataagctccatggagggtgggggacagaaatctttctttggtcattgatgttagcctcgcatctaggatatcagtgggtgtgtaaacaatattcaatcaatgtttgtttcaatgaattgttgccaaaggaatgaagtacgtgctgcatatattaattgaaaattcttattcttttttagatacagaacagttttggaatgaacattgccagtgctacaattgcactagtggggactgcttttctctcactaaatatagcagttaatatccagtcattaaggagttgtcactcttcatcagagtcaccggacctatgcaattacatgggctccatatcaaatgtatgtttctgaaaaatatgtataagtataaaatatttcaaacaatccaggatgtacagaaaaataatatatcaggtaccaatgtgccataatttgaatcttttttttttttttttttgagacggagtctcgctctgtcgcccaggctggagtacagtggagtgatctcggctcactgcaagctccgccctcctgggttcacagcattctcctgcctcagcctcnnnnnnnnnnnnnnnnnnnnnnnntttttttttgtatgtttagtagagacggggtttcactgtgttagccaggatggtctcgatctcctgacctcgtgatccgcccgcctctgcctcccaaagtgctgggattacaggcatgagccaccgcgcccagccaaccttaccaattttttaaaaatttgtgttcaggtactctacctcttctgaactctacttagaaattaatattttcctttggaattatccatttcatcccagtgatctatgaactgttaattacagactcactcctaagcttcctgttttctttttattattattattatacttgaagttctagggtacacgtgcacaacgttcaggtttgttacatatgtatacatgtgtcgtgtttgtttgctgcatctattaacatgtcatttacattaggtatttctgttaatgctatccctcccccagccccccaccccacgacaggccctggtgtgtgatgttccccgccttgcgtccaagtgttctcatagttcagttcccacctatgggtgagacactacttatggaagtttgtgttctcattttctttattacatttttaatgatctaaatttatatttgtcggagcctgatttttctgtgaatttggaggtatttttcctccagggatatattgtattggttgcttctaggtgcctcagtaataatagtagaatcattagcccaacaattttattttttgtttatattagctcagtgttttagtttctagggataatgtaaatgcctaaacccctatgaagtgctaatgaaattgtggaagggccatttttgttcatttttctaaactgcctactcctctccttagtttactactattcagattggaagatgttagtgataatgtcagaattttgtttctacagcttcttccccctgtagctacttcacatgcgttgacatagaaatgtgacacatctttctcattagagaaaatgttttcatgcttttagattgagatactatctcttctacagtgttatatgtgtctctgtctttaatttatggttcactttgttccactttacgggagggagatgttgtagtctggtttcctgctgacatttttttttttacctctggatgttgccactgggtttgatataaggcatcatatcccctagggcatggtgtctctactgctgattctcaccttgctggaattatgcgtaactatctctaccatagccatgtggtgcaatgcaaactgctgtaattcaagagagtgagatttttcaaatgattaatcattcacatgatctcaaagcctccctgtagggtttgaagttgtttctgatgcttagaaataaacctttatgtggtaatgatttgtggagttcctggaattagagattgtatgaatgttagagatggaatgaagggtagaaaagaatttggatgtgaacatgcaagaggaaatactgtacttgatatataagagcatactttcttatacagctgtaattaagttttattattttcttataacttgtaactttctaattgtatgacctaggaaaaattaataattctttctaaattttagatatattaactgtaaaatgaaaataatattttcattctcttctaatgtttgttgtgagtactgtgtatataatctttatggcatttggcacagtaaacatcaatgaatggattttattgttgatgattatgatgataacaggaagggatgggaggagaaggagataatgatcctgttcttggacattaatgttgttttattttctaggaaatttcctcacctcccaattctgtgtaatcaagaatacctccttatgaaaataattctgagagcatgaatatttgaccttaaatctccagtgactcagagcttcacccacaaactcaggagaacataagcctgctcgtaaagctcaatccttctatcatggcaccaatcacaagaaccttggacgtttgactgactctatcctttctctcctaactataaatcctatttgtgtgtcgtgggtatggaaggacagatatatttctttaggcattcttggatatctgtaacttctatgatcattactccaaagttgtttccagaaattggttctatttcttcttatccacctactccattgctttatgaggtttaaggaaggaaggcggtataatccctattcaatatattttttctaaaatccaacttctgaccgcccagtaggaagaaaaatgagacattttttccattacagagaaatgcttcttgactttaacatcagcattataaaaagtgtcaaataaaaaattaccatcattatcattaaaataaattttcactgtatttgagatgggagggttaaggctcagggattttatttcagtgaactgctggaactcacacatgccctgatatgtaaatgatgatttatgttggcgagtctgagagcaagcccaaatgtgttcttcaaaggacaatgggaaactgtaaagtagagaactaaagaataaggcctttagaatctgacacatctgggttcaaattctgaaactgtcacttattacctgtatgaacatgggcaaattatctaatctctctgatctatttttcctcatctgtaaaataggtgtaataataacaactactttgtcggttgctctgagggttaaatgaaaataaaaagaaaatgtgaaacagcaccacaggtacttgacaatgatgttgctgttgtggttggtcttgctgttgctggtgaaagctaaggtgggattgtggtcagatgtgctggagagatacagtggaaaacttacttacacttccattgtggctcctcgtataacctccaacaactccaatagccatcttttcgaggtggcaatgtggcgtgaaaacttccctcagttcctcgtttataaatctgctaaagcacttatatttcttattcataaatatccaagaaaaataaaatttatgaataagaaatataagcacttattgtgtccataaatttataccaataatttattcttagttacgtgtatatcgtatgtgcaaaggttcttttctaacacttgttgcctacttatataataattatttctttattttttaatccattctgcagcgggataattaaggaaccagagagactgaggggttgaggaggaattatttaattatttaggtgcaccgacccagtcggattaacatccaaaggactgagccccaaacaaagagtccggttaccttttaagcattttgtgcagcgggggacgatctgtgcagggggaagcatattacagaagtgagaaacaaagacagttattcaattaagacatgtattacattatttcttattttttcaaggaaaaacatgttttacgacttgagtttatctgcctagtgaccttgcacctgcacagctagagaaatagggtcttcacaatgcctgggaaagggagagataaggcttactagccgcagaaaaacaggcagttaattttaaaggactccagctctttctcttcttcagggggaattgggtttctcttacatacaaccgagcttttgcttacacattctttaatttcttttaattcctgttctaattcaacaatcatttagggagtgcctacagtgtgtcacgtattgtgctaagagcttggcatataatagagaatgatgcaaaatctctgctcttaagttgcttgtagtgggagatacagacccctagaaacacacaagggctctcataggaagagtataggaatcttgagaagcacgtaggacgagattctaacccagattagaagacatgtcagtgataattttttagaacacttttcttctcaactgagttcttaaagataactgagcgttaacatgatggaaggcaaatggaagaaaagaggatacattaaaagcctttaagttagaaaaaattttgaatattcaaagaataaactagagactttagtgggtctaacttcagtgtataatgggcagatggaaaaataaaagtttggagagaggtgtacatcacaagagattataaaatgacagcactgtgagtttttttttattttttttattttttattttttatttatttatttttttattgatcattcttgggtgtttctcacagagggggatttggcagggtcataggacaatagtggagggaaggtcagcagataaacaagtgaacaaaggtctctggttttcctaggcagaggaccctgcggccttccgaggtgtttgtgtccctgggtacttgagattagggagtggtgatgactcttaacgagcatgctgccttcaagcatctgtttaacaaagcacatcttgcaccgcccttaatccattgaaccctgagtggacagagcacatgtttcagagagcacagggttgggggtaaggtcatagatcaacagcatcc

SEQ ID NO: 76 - DNA, 51959 bp, homo sapiens
  genomic_DNA (1)..(51959): n is an undetermined nucleotide (dATP, dCTP, dGTP, or dTTP)
  misc_feature (1)..(2): n is a, c, g, or t
  misc_feature (29859)..(29900): n is a, c, g, or t
  initial_coding_region (29933)..(30028)
  misc_feature (30581)..(30634): n is a, c, g, or t
  misc_feature (30674)..(30674): n is a, c, g, or t
  coding_region (34943)..(35011)
  misc_feature (37614)..(37697): n is a, c, g, or t
  misc_feature (38413)..(38415): n is a, c, g, or t
  coding_region (38775)..(38831)
  coding_region (40333)..(40492)
  misc_feature (42955)..(42978): n is a, c, g, or t
  coding_region (42979)..(43079)
  misc_feature (43080)..(43130): n is a, c, g, or t
  coding_region (43668)..(43736)
  misc_feature (51933)..(51959): n is a, c, g, or t
nncaactccctcaactggaagttacctgattttttctcatgattagactgatgtttgggttttgtggaaggagatcacagatataagagccagtatcatcacatcccatcaacagcccacactatcaacatgacttaccactgttactcttagtcacttggttgaggtagtgatgtcaggcttcttcactgtaaatttactctttttattcccctttacattctgtattctttggaaggaagtcactattcacagcccagacttaaggggtggggagttacgtttatgaatccaaagcccgatggcctgtgtgttcttttgccataggctccactcagtgaactgagaggttgctgagacctgtgattcaaacagcaaatggagtcaatggggtccaggagaagagtggggtgggtggccctttagaggtcctcctgagtgtcctgttggttggggtccaactccatggtaacagtctttatggtaagccagtagatgagtatattcaagagatctacatcaggtattgtaggagtgataccagtagccaaataggtctaccaattgctggggttttttttgtggtttttggtggggagggacagagaagttcaaaatcttgacaatcatctttgcaatgagaggcttttctgctttctgaattatgcccaggagttttattagtttcatttggatattattaggtctttttatcttgtctgtgttaatggcccagctgggttgctgcatgtggatcaacagggtgtctagtccttgttgggcagtcccttcatctgagcccaccaggaagagacaatcaatatagcagaagggcagagctttctccaggagtgagactgtgtgtaactcatggcccatcactccatggcagatacctgggagcttaggtggccttgcctgtgcatgtgctctgctgtattggtggtggctgttctcagggcactgcaagggacagtgtctggagtgacatggctgcatggtgcccctctccctcactaagttctacaagattgccttctttatcatgcttacctctgaagtctgcagtgaaatattattaaaccacccacgcattcgcagtataattacaacttggtaatgatatatgttacactgtgggattatatttccttgtgttttaaatatgatttttcagagactgaaaaatatctgaaaacttctccatctcttagtgtgctggttgggtttagatcaagatcttttaaaatgaatttgtgagcattccctttttaaaaaaaaatcttctgaatattttgaataaaatttccattgtctattatttttagtatcatataactcacttctcagggcatggtgttttatttatttaattatttattcaatttgcatatgtatattttaaattacttctaattttcagggtattaatatttattttaaatagtaagtatagtgtattcatttttatttagattactaatatatcagattttaaatgtataacatcttatattttcctttctattcaccattatttaattgttcttatttttccaatttctttttttctattagactgccaaaattttgtttaatttccttcttattatttgatggaagacccaagaattgccctatggattaaacaatcacagacaatcaccatgtaggccctcaaagttgtaccatatttaagttggcttcgcattttctcagttctcatgctggatgtggttgaagagagaaaaggcagtattcctggaaaacagaactggaagtggctgaactgtcaggccaagaaacacacattactatttaggcagagttccctattaagacagagctcccttaatattttaatgaagtattaagtgcatggggcttttggtttgacattcacttgggaaaggctgaatgcacatcagttagctgtgatcattgttggaagaatggatcagaagaaagtgtccttgggcatagggcagacaaaggagtgacctgtagtatgcacttgttgcctgcccagaatccatcttccactttcctcttcccagcaatctgtgacttctgactggggatccatgtaattctgaggactgactccgtccctgcctccactgtgctctggctctaggcccagtcaatgtgcttttcacaccccctttccactgcaatgattgaatcagcgtggacatgtaaccttacatggtctcatcagaatgattctcaatcgtcttgttttgaaactctagactattctaaaaacactattcttccaaactacagggtgatatatggatgtaaggcctagacttgatgtagacatttttgctaagcggtgggaaatcagcctaagcatgaagccaacacacagaagagggtagagctaatacactacacaaaggtacacaagagttggggctggagcctccatgacatctaaacatctaaaccagtagctccaatcttatctgaagttcacctcaactctgtagtcttcagaaacattagcctacattttttgttttgactttctctatatgataaataatgtactcctccctcctcccatcctttgcatttagaaacacaaaaaatgatttgtttaatgtcacaaagaccactatttctccaattcagattgtaatttagataagtaaacaatcaaaatcctttactctgagccctggaaatgaaggatgaaaattgaggagagaaaaacaaagaaaccagggcattcatggtgttagatacagttaggttcccacttcaaacagcttatccagtttccctgttctctatcctataattccacatacccccttgcctttgctgcaccccaacttgtctgaacctaggcatgcctgaacttgctacaaccccagtccacattcctttccttattagggaataggttaccttcctaatgtccccgtaaatgacccctcgtctctctcttctcaccttccttacatgtctaccttatctaagaaagtttaaatgtttagccagtcacgactagttagactgtgctgtccaaccctagccaatagaggaaacacacagaagcagaagctgcattagagataataaaacccctgctttcctttgttctgtgtgctctcgccattgctccatatgcgagacacacccttctgcagaagtaaatttgccttgctgagagaccctttgtcctttgtttcagcgctagttcttttttgtgacactgagcatgtgtttccaacaatggggacaggaatggaaaaatgagttggagagaggcaataaaaatctttcttctcttgactaatatatgaaaaacactggcaccaccaagtaaaaaagataagatcccctcccaccaggaatttaggctccttatgggtactcagacaaacagtttttctaagctgtaggaaaccgatactaaattgacaaatcttgatgaatacctcataggctgtggcattcaatgctactattttggaccttacggtgcaaaagaaatacattaatacactgcctaacattcatatcaagtaattacactgtctactattgctacattgtcttattttgctcttgttccaaattcacataattttccctgttgttattactctcttttcatgaatgaagaggtttttgaaaacaggtttgctacagcaacaattctctgcttcacacaggagggactcctaagtgccagcctctgtatatgtgaacagggctgccattttgttctcaccagtctaaagttatcctaggttcctattccaaatgagctaccactcacagttattttattcagccaatatttattaagtatctggcccatgcagacctatgcaagagatcagtaatacctgtagaagataatgtccctgcccttgaacacagtacatagggagcatcacgagagcacaaaaagttcagatgtgttggctaaaatttcccttgggaagaggaggattcattgaaaattaacattcaaataatgctttcaaagaagagcaggtgcttgcagccatatgcattctaggtaggggaatcagtgcgcacagaggctagagccctgaaacagtttggcttactggggggaactgcaaacactttgttatgattctgtcacagtgggagaagtgacagtttcatttgggtgagaggtaagatcctggacgtgcaaaatgtggaattcacaggacttcaaatgcttactggagacattgggctttgtcatgcagtcaatgtgcagacacagaaagattcaagcagcacagtgacaaaatcccatttctattccaaaagttcctattacagtagtgaatgtaagggtacggaaaggcaaatgaaggtcagaaaatccaaaacaataagacatgggatagaatattaatattaggcaataaaagttctaaggaaaattctcaggtatgacaaaggagggcatttataatgatatgttgtttagaatcttatgatcaaataacatataatattctactaataaaaaaatgcctaggagtgtgagaaactaacaaaaacacagtactcatgagaatttttaacatatgtaagttttgaggaatgtaagccaaaaaagatgatttgaattacaaaatacttgaatgaatcaacactaaagaaagcatgctttttaagaacccttggtacattggcaacaattgaccaaatattcatcccaaaacctcactaacttaaaacaaaaaatccagcccacattaactaatcaataaagctagaggtaagtaatacaaatatttgttaccaaaataagattaatttcaagcccaatgaatatttatagacttttaattgttaataaccagattaaatgcctaaagtgaatatattttggtcatactaaaacaaaaatataaagtgttcagtaattcacttaagtggaaacatgaagaatttttatgaggaaagacatacgccttttatttagaaacatagacagagacttgactgtattgacttatttctggttgtcagttattccacatttttttcggacgtaatataatatactttcaaataaatctcttgtggaaattgacttaatgttctttatgtccatgtggaatgagtatgactagccaaaagtattttaataaagactaatgttgaagtaaagacagtactatcagaaattaaaatggagtatacaataactaatacaagtgatgcgttgtgttaaaaaagactgaatggcaagaaaatgagaatagaatgcccacatagtaatcatagaaaaaatataaatggatgaagtgcaggaccagacaatttaactaaagaaatagaaatggccatgcacttatgcatgaaaaaatggatttgaaagcaaataatttgtataatgaaataaacgaaaagtgatgtgttttgaaatgcaaaaagaaaaaaaaagtggttggtggagaaaagctctgagagcaccacaagaggaacagttaagatatgaaagtccctggaaaagaggaagctgggacaggacatgcaacattgcacttttcacaggatcagcaccaagagcttggagttcaagttcccaggtactttagttcagtaagactatgtgatagctgttatgcggtcatctgggggctggtggtgaaactcaagccctgccgtcttcttattgtgtttagtcggaatgtacaacaattatgcccatgaggcaatttcatggcatggcattggtatatttgcttcagggctagagtgacagtcaagtgaggaagactgaagccgaagactgaacatcagagttatacatcttgacatcctttgtccttacttgtattttaaaaacccaggcccagataactccaacactcggtttctcctatatctgacatttggaaccttgtattattagttcagaagaagtactgaagaggcctcagtgcacaggctcgggactgatcctgtaacaaaggtgatcagatgacacccaggcccagctggtctcagccaaatggctcagggttgaccctaaatatggaaaaccagagaatcaggactatggctgcctaccatgccctgaataaccagttatatggattgtcatctggtagaaatcctatgcagggggtgttaatgtcatcctttgtggagtctcttggttggatcttcaaccacttaatattttcatcaagaatttagttgctgatcctatttgcaaatgatccaaaaacaagaagtataatttataaaacgagagtgtccagattgaagatacaacccaaaagtctggaacatgagcgttggaatacagatcaaatttaatcaggtaaaattaaagtcccaagcttatgtttaaaaacaaatcacctgcacaaacctgagatgggactagaacttgcttaacagaagttaatgtgagaaaggcctgggcccttctactagttagctgaaaggatggagacagaagcaaaagactctccaagaagtctgcctttgcctctagagcaatggatctcaatcttgtctgagcattgggataacttgggaaactttaacacgtactaacacatgagccccattaccaggtattctgatttaattaatatggattatggttggagagtcaaaattttttgtagctctttagcggattctaccgtatagtcaatgttgccaattactgctataagcctgtagatatcaaacttgagtgtgtatcaaaatctggagggcttcttaaaacacagaatgcacaccgagactgtctgattcaataggtctggggtagggtatttgcatgtcaaccacaatgtcaggtgatactgatgctactactctgggaaccacattttaagagctactgctctagacgaacctggagttctccagatgcaactaaaggctttttaaattctaccgctggtattgagccagaatgcatagaacctggccctgtgcctatcttctcttctgagtaggatttattccataagctttggccttctctttacatcttcatatctgtgtctggagggtagggccaagttggacttcgggatactaaactgaggccttttattgtaaggacagagagtaggatgtgatgtcttgatgctgcttcaggttactagaggagacaatgatctcagttcagaaccaagcttaaagttatatatctctcggggactatttgtcccaggaatgcaagctaggatttacttttcaatctttccccagtttctttcccaaaagtaacatatctttgggaagaaattagggtaaatgagcaatggtaagctcaaatcctggcatcaggaaaattctcctagcactcatggtatggcctgttcaccactgaccacaaagacatgtagaaggtggtgcacaattttcaggagtccagaaatacaaacagttctcttaatacttgctctgtagtctcaattgttgtcatctctttccacacacacatgcatgcacacacacgcacacacatgcacacaggcagttcttacaatattgagatgctttgcttagactgggctgtatataagagacctgatttacatcttataaaaatagaacatcagagttagaagagacgtggaaatctttctacactgaaatatgagaagtctgtggcccagggaaagaaagtgattcacgtgagtcatgaaggtaatgaatgtataacccagtttttctgtttttcctattatccccttcattttgacattgaggtgtcatatttaattgagccacaagagggaggcagtggacaagaaattgtcctacctaatttgaattcctacctaatctggtgtcttctgggaagaccttatgaaaagtcaactcccagctctggtcttgtatactagcgctgggttgggtcccatttctatcccatattctctgggaatctagtagatacagcaagtcatccctctgacccttagctttttcatctgctaaattttgtaggtattatttagatattattacttatattgaaaggtgttagtgaggatacctgagaatgaattttcaaaacatcacaagttgattttcaagatagtattaaagtgctttaatttcaaagggtgctttttgtaccatcctaactttataccacttttttgtccactcccaccccattctctgcactctggtgaactgaaaaacatattttagattttatctaattgttatttactctactctcctctcccttctcctgtctttccccacattctgtaaaatgtgagcacatgcatgatggaggagggtgtggatacagctagagggagaggttgagactgcacatctcacctggtctcatattctgaaaaatctgggttataaatggcacaccagagacattaccatgccctcctctctgctttttggaacatggatcttattgcagaaggtgagggtttgggaaggcttcgggatgagtggccaggtggcaacatctgtgcctggcttcttcccttcttggtggaacagccactggcctctcataagggaaataacctgaaccagcccgaccctgagagcctccctcatggtgttggacttatagatcacacattaaggaaatatgtccatgagagattttaggatgactcatatggtttcatggatctagaagtgactttgaaagtgaatgaaccaacctagtagtttctagtgaagctgactgatggaaatgaaccaagcatttattttccaatgccatagagtggatcggtgaaagctgggtggagagaggattaaaagaagtgaaataaagttaggacttctgaacgtttctctaatacccattcccatcatggttgggccagtaccatttttggagtttttgttttgtttctctttccctttattttacacagtatagaaattcactgactactcctcagatttttccagtcctgcctccccagagggactcacatcccttttcatggcagtaaccacctggtgttgctcgagcacctcctaggattcccactcgttactcaaaatggataataaagaaattttctcaaacgcaatttaggtgaataaaatttaatctaataatatgtgtgaactattcttctgaaataataatgctgagataatgagtggaaccacgcatttattttcttgaacctgataatacaaatccctagcagttatctggaccaacaagtggtaagagcagaggtcttgaggtgagcacgttccatgcttctgaggaaacagtacgtctggagacacattgagactggaatagggagaggagaaggcaatgttgtctgagatttctggggggctggattataaagcgacttattaaggagatacggcttattttgagtgaggtaggaggcattggaagattttcagcaaagggaagacaggatctaacttgcatcttaacaggaccactctggctgcctgtcttggtaagaaccgactgaagggaggcgagggaagatgtggggagagtagcgaggaggctccggcagtagtcccagagagaggatggtgggttgtgttgttggaacacagcatcactgctcattcaaatcctaggaggtgggtgcctacgcctctctttctttcactccccacattcagtcattttgaaggctcaggtatcagtaaaagtgtccccaagaaacataattcatcccatgtgacttatttaagggatttttatgaagacctcgcagaatttgggcagagttaagggaacgaagaaggaaagggaggtcactacagacaagaaaagcaggaaggtatgagaagagaacacactattatggggaccaataaagagcagaagtcttgtaagaagagctgctttgtagtataactgtggaagaagtagctacttccaaaggctgtgtcaatgcagagagaataggaaagcaatgctttgtcctttctctctttccagcctctaattctccaaacaaacctgaatggtttgctttactgtcacacatttataggggatttgtggagattttcccagagtgacacaattggcaaatggctgaattgtccggagctcagacctgctgctttttagccctgtggtctttctattacactacctggtccccctccagagagaaacaactaaatgagacttggctttggctcacagagacaatgaatagggaaagttggaagtctaagtgggtgagaagatatattgtcggctcattcccttttttgccctcccaagagaaaaaagagctggcattttttttttttggaatgaaatatattttctttttctgatagtgttccactgctcttcctgatgttttctgtagctttctttttttaaaacttttattttatgttcagggtacatgtatagtttttaaataaataatctgtacaccaaacccttgtgacatgcagtttgaaagacaagtgtaggtaccaacctcccaggattttagtgagaagcaacgctgcatcccaacaacccaacccaccatcctctctcttggactactgtcggagcctcctcactatcctccctacgtcttccctcatctcccttcagtctgttcttatcatggcaagcagccagagtgatactgttaagacactagtcagatcctgtgttccttttgctgaaaatcttccagtgcctctatttcactcagaataaacctaagtccttaataagacctcaagttcttttataattgaggccccgcagacacctcagacaacattgccttctcttctccctatcccaatctcaatgtgtctccagacacactgtcccctcagaagcacaggaacctgctcccctcaagagctttgcactttccacttctttggttcaaataactgctagtgagctctaaggatttgcattatgaggttcaagaaaataaatgcttacatgccacagaggtttggtgtaccgattattttatcacccatgtaataagcatagtactcaatagatagttttttaatccttaccctcttctcaccctctaccctccagtaggacccagtgtctgtttttcccttctttgtgtccatgtgtactcagtgtttagctattactcataagtgagaatgtgtgatatttagttttctgtttctgcatgagtgtgcttaggataaaggaatccagctccatccgtgtttcttcaaagaacatgaactcattctttcttatggctgtgtagtttcccatggtgtatacgtaccgttttttccagtctaccattgatgggcattcagtatgatttcatgtctctgctatgaacatatgtggacatgtatctttatggtaaaataatttatgttcctttgggtatatacctaataatgggatagctgggtcgaatggaacttctgttttaagttctttgagaaattgccacactactttgcacaaggctgaactaatttacattcccacaagcagtgtatggtgttatttttcctccacaacctttttagcatctgttactttttgacattttaataatagccactctgactggcatgagatggccacagtctccttgtagttttgatttgtgattctctaatgattagtgatgttgagagttttttaagtatacttgttggctgtgtgtatgtcttcttttaaaaagtgtctgttcatgtcctttgcccaccttttaatggggttgattgtttttcacttgttaatttaatttccttatagattcttgatattagacctttgtcagatgcatagtttgcacatactttctcccattctgtaggctgtctgtttactctgttgatagtttcttttgctgtggagaagctctttaattaggtcccacttgtccatttttttttttttttgtgcaattgcttttgacatctttgacatgaaatcttttccagggcctatgtccagaatggtatttcctaggttatttttcatggtttttataggcttagattttacatttaaatctttaatccatcattagttgatttttgtatatagtgtaagttagggatccagcttcaatcttctgtagatggctagccagttatcccattaccatttattaaatagggatcctttccacattgcttgtttttgctgactttgttaagtatcagatggttgtaggcatgtcactttctttctgggatctttattctgttccattggtcaatgtgtctgtttttgtaccattaccatgctgttttggttacagtagctttgtaatatagtttgaagtcaggtaccatgatgcctccagctttgttctttttgcttaggatttccatggctattcaggctcttttcagttccatatgaattataaaatagtttattttctaattctgtgaagaatgtcattggtagtttgataggaacagcattgaatctgtagattgctgttagcacaatgactattttaataatattgattcttcctatccatgagcatggaatgcttttttatttgtctgtgtcatctctgattactttgaacactgttttctaatcctcattgtagagatctttcacctctctcattaactaaattcctagatattttattctttttttttttttggcctattgtgaatgatttggctctcagcttggatgctgttggtgtataaaaatgctactgatttatatacattaattttatatcctgaaactttgctgaagttgtctatcagatgtaagaggttttgggcagactatggggttttccaggtatagaattatatcatctgcaatcagagatagtttgacttcttcttttcctatttggatgcattttagttctttctcttgcctgattgctttgtttagaacttccagtactatgaaaaggagtggtgagagtgggcatccttgtcttgtttcagtcatccaggagaactttccagtttttgcccattcaatatggtgttggctgttggtttgccatagatggctcttattattttattattttgaggtatattccttcaatgcctagtttgttgagggtttcttaacatgaagacatgtagaattttatcaaaagccctttccgcatctattgagatgatcatgtttttagttctgtttacgtggtgaattacatttattgactcaccttacgttaaaccaaccttacatccaagagataaagcctacttgattatggtggattagattttttatgtgctgctggatttggtttgctagtattttttttgagtgtttttgaacctctgttcatcaaggatagtggcctaaagttttcgtgtgtgtgtgtgtgtgtgtgtgtgtgtgtgtgtgtgtctgccagattttggtatcagaatgatgttggcctcatagaatgagttagagaagatcctttcctcctgaatttttggaatagtttcagtaggacggtgtcaactcttctttatacatttggtagaattgggctatgaatgcatctggtcctgagctttttttagttggtaggctttttgttgtgatttaatttcagaacttgttattggtttgttcaaggtttcagtttctcactggtttactcttgggaggttgtatgtttccaggaatttatctatttcttctatgttttctagcttgtgttcatagaggtgttcatagttgtctctgaacattttttgtatttctgtgggattagtgataatgttgccattttcatttctgactgtgtttatgtgggttttctctttttttctttattagtctagctactggtctatcaatcttatttattctttcgaggaatctcctcctggattttttaatctttttatggtttttcacatttcaatattgtttagtttagctctggtactggttacttcttgtcttctgctagctttggggtttgttagctcttgtttctgtaggtcctctgtgtgtgatgttaggttattcatttgagatctttctaactttttgatttgggcatttagcactatacattttcctcttaatgctgctctagctatgtcccagagattctcgtatgttatatctttgctctcattagtttcaaagaatttcttgatttctgactgaatttcattgtttacccaacagtcattcaggaacagattgtttaatttccatttaactatgtagttttgaaagatattcttggtatttatttcagtttttattgcactgtggtctgacagtgtgtttggtatgattttttttaactgctgaggattgtgttatgcccggttgcatggttgattttagagtatgtaccatgtgcacatgagaagaatgtttactctgctgtttgggggtggagagttctgtagtagtctgctaaacccatttggtgaaatgttgagttcagatcctgaacatctttattagttttctgcctctatgatctgtctaatactaccaatggggtgtcaaaatctcctgctattatcatgtggttatctaaatctcttcatatgtatctaagaatttcttttgtgaatctgggtgctctggggtttgatgcatatgtatttatgacagttaggtcttcttgttgaattgaacctttaccattatataatgcccttctttatcttttaaaatcattgttaaaatctgtttggtttgaaattagaatagcaactgcttcatttttctgttttcttttgcttggtagatttttctccatccctttactttaagttgatgggtgtcatttcttgtgaaatggatcttctgtggacaacatatagttgggtcttgcctctttatccaatttgccactttgtgccttttaattggtgcatttatcccattcatattcaaggttaatattgatatgtgcaggtttgatcttgacatcatgttgtcagttggttattatgcagacttgaatttttgtcccgaaatttggacaggaaggcccaaacagagcttcccagcttaccaggagcagaagcacaataggaacacatcaattataaccgatgaactgctggatgttcaatgtggactaacttgggagctgaaactccatgaggcccagtcctggggagaggtcaaacacttgcatggcttttacctcaaagtgtcctagcaggtatttagtgtaaagaacagagaaaaatcttgtgcttctgattaaggaaggtaatataaccattttttaaatactccagggcattctgttgtctttaacaaaaaaagtcttccctcaagggaaactattttttcagattctgattgattctgattgatttggataataccaaaacctaaccagtcttggaaaaggtcaatacacaactccaccttcctctatccttccacgtggggaaactgaatattcagctacatctctctctcgtatcctgcctgacttaagttcaggtaggggctaagaagcatttgtgaagttgataactgagaagcacaagttgctaaaaggctgagacctaattatgatactagaggatgtttcccctcactctacactaccatcagatgaatcaggatcctgtatgataacaggagattatagtgaatgaactgtaaacctcagaccctatttaagaagtggtgtctagggagatccaataataataggggagaccaaaacaaggacattacaggacatttcagcctttgacccaaatagctacaacaaacaataaatgcagcctaacttctagccagataaacataataccttacataaaaggcctatttactttacttccttttatgtccagctatcaaaaaaaaaattacaatgtatgttaaaaggtaaaagacaaagtgtgaagaaacaaagcaagcaacagaacaagattcaaatgcggcagagattttggaattatcggatcagaaatgtaaaataactatgattaatattataaggactttaacaggaaaagcatacaacatacatgaataaacagatatgataagcagagagaagaaatttctaggaaagaatgaaaaggtaatgctagaaatgtaaaatacagtaataaaaattttaaaaatgtttttgataatttcatcagtatactaggcatgtcagaggaaagagtcagtgagcttgaagatacgtcaataaaaacttccgaaactgaagagcaaagggaaaaaaaatggaaaaaaaaagaacagaacaaccccaaagtgcaggacaactacaaaaagaataacattacacataatggaaataccataaaaagaaacaagaaagaaaggaagagaagaaatatttgaagtttaaataatgactgagatttttccaaaattagtaacagatgccaaatcacaaatccaggaagctcagaaaataccatgcatagtaaagagtaaaacatctatacataggtatataatattcaaaaacagaaaatcaaagacagagaaaattttgaaagaagcaataaaggagaaaaggaaacttaactagagaggaacaaggataagtattacattagtcttcttttcagaaactatgcaaacaagaagggggtgaaatgaagtatttaaaatgttggaggttaaaggttcaggcaccagtcacacttccttgttacagtagacactggttgagatgttaggtctttcagccctggagttctgcctatgtgtgttgctatgttgtacacaggtcaactcaaactcttccattttaagagtgccagcatgttccatagagctcagtatatctcaaggcctgggatttgtgaattaatatcctcatattggaagaaaaatactcatgaaatgtggtggtgatgagatacacatggtaggcagtatttatggcaagggtggtgcttaaaaaagctggttcatattggcaatgagataatcagatgggaagaacgaaccaggtgtagaatcactggagatcaggccggctggtccttagaacgtacctattctaactctgaggatgaagaaacaaatattactctacatcgcattgagtttagtttctgagttgagattaaaacttggatcatctcactcccagcgatgtaccttactgtcttcagccactttctttctcagacattcttcacagtaaatatttcttgcacatgtgaggagacttcatgtattctctgtgtcctggttttcccttagtatcattgatcatccgtgctccctcttagctcttaatcttatggttttaatacttttttcctagaaaccataacaagagccataatcttgttgaatcaaagtccgttggcctatcaaaatgtttataacatagttttaattcatccactgtttcattaaagcaaattataatgagtgactgctggagaatagtatttgcttggatttctgaatatagtacaggtagcctggaatagctaaggaatctgtgttcataattcaaaggagagactgtaaaaaatatatcaaaacactaaagctggttttgaataactactggcatttttttagctttttgtggaatttattttaactgcctcaaattcacaagataaaatccggtgtattagaaacatgactttaggacacttgatgaaatgaaaatgttgggaaattacttgccagagatagttggtgattattatcctctgtgaaactcaatgttcaagggaagtgagattagacatctctataattgtgggcctttagaaggcatgtgatgaaataaaaaaaagaaagcttttgtttcctttgataacttatatatttgttcaatttgactgacttgattggctgtaagtcattttctaagagtttcagattaaaacttaatttcattagttggcaaaaatggttgcagagcagtaaattggtcagagctaagagatcttgtaatgataaagaagagaagaatgtgatttgtatacactactttggtgtcagcatagacgagttgggctattgtcattaaacagaccctgtccttaggggacactggcatttattttgcatattaatatacataggcaccagtatctgaggttaagtgttaagaattttaagagtgttttcttaagaataatacctttctttgctacatatgtactatttgaagaaccatttcttaagcacaaaggaaacccatatgggaaaaaaaaacattttgtgcttttaatttagaattatataggcactggaaaaatatttttattaaaaggatacaaaataatattttttctagattcaaaatgaggaattacagtgcttagatctatcacctcaactttacatgactcctacttcctaatatatttgttttcacattttccctctgttctaatcttttattccagatatctctaaggcttttaccaatctctttagctgagattgtaatataattttctctgatactgtatctcagttcactgctgactgatgtgccacctacatccattctctgcattgtttctattttacccacccaatagcattcaacagaaatgttcctacctggtgtcagacattgagaaatgttgaaatcaaaaagataaataagatacattatctgtcctcagagatacaatgaactggtaagaaaaacacttataaaaatataattttcaaataatggctaatcttggtggattaaacacatctatttcctcatgaaacccaactaaatgactataaagggtctgggagaaagtcataaatccaaaaattcaaaaataatatgagagaaattggatcatttttttaaatgttagaaaccagctagacaagcaataaatgacttagcagcctccggaaagtgaaaacctgactgacggaattggaagcttagaaaaaatttgattctctttgtagaaccccagtaagtctcaagaattataagtgctttcagttgaatatgtctggggacacagctaattgtctgagaaggtagttgtattagtatgttctcacattgctaaaaaagacataaccaagactgggtaatttacaaagaaaaagaggtttaatggactcacagttccacatggttggggaggcctcagaatcatggtggaaggcaaaatgcacatcttacatggcggcagacaagagagattgagagccaagcaaaagggaaaaccacttataaaatcatcagatctggtgagacttattcattaccacgagaaaagtatgggggaacacgcccccatgattcaattatctcccagtggttccctcccacaacatgtgggaatgatggtagctacaattcaagatgaaatttggtggggacactgccaaaccatatcaatagtgaatacttaagtaagtgaattccctgagaatagtgaattaagatccctgaaggcctagagtataaccagtcctaactggaataggagaatataaggcgccaggaagggagagtgtatacagaaaaatactaatgaaacagatcaattacctgtgggtctatagacactgagatttacatttatggtggagtatttaaaacaacttattttcaggtatgtagaaaacagcatatgaaacatgaggcagttactaacttcagagagaaaaatggtcaaaaggaagcgtaatcataacactcataatgaattagccattaatgatttaaatactataaattgagttaactaaaaaatcgtgataaaactatatgggagaatgagggaaaaggaagtgttatggtgggaaggtgtgtccagggtaaaaatgaaggatataggggttagtctattgtcttcagtagtaggaggttagtgcataatatataaaaccaaaaattagaacagtatttaaaatcattcacttagaaatatggagtcaacacaaaaagaaacaattaaaatttaaatacttgcttctggagaaagaaaattgattgggaactggggaagggggcactaatgatttctttcaggctaaatccagtgaacattttactgttgttagcttgtctctctgaagtatttaataataattgaatgatttcttcctactgaaatatttctgtgctcaaaaaatgataagtaatttatttatattacctaatataaccctttcaacaacgctatgacatattactatctatattttacagatgagtaaactgaggtgcagaaagcctaagcaacttgctccagctcacatagggcataggattcaaaatccagctcaaggccgggtgcagtggctcacgcctgtaatcccagcactttgggaggctgaggagggtatattacttgagatctggagttcgagaacagcctggccaaaatggtgaaacccagtctctgttaatatataatataacatattatatagagatacattctattatatatataatatattctattataatataatatatattctattatataatatatattatatattatatctattatatataatatatctgtatatgatatataattatatataatatatagatattctattatatataataggatatatattctatatatatagaatatatatatttctctgtcaaatttcatgttattgttctcttgaaattgttatctgctaataataacctgatactgtctcatttcataccatatggagtgggaggagagactgatgcctgtccttagtccagaatttcaacctctcttaggaagtcatgaaactctgtacccttgtcttctgcaatgccacattttccgagtttgcctgctatcttccttaccctctttttcataatcctctgggaaatcttatttctgattatactgtctctatcctctagaaaaagggtttgacgttttctgcctccacccacaagcctgggtgacctcatccctctgggcgaagagctgttgggtttacctctatagccatgttctcattccctagctcctgccagttatccacttcttgtcaactttatttgaaggtccctacacaactctgatcaaatacgttcaaaattttactatttgttcctgcagttctgtcctggtccatgtctattgccttactgaatggctctatcactcattcagtttcctaacccagaatctgagtgtcatcctttcctgttttttctcctgatttacacatccattataccaacaagtactgtcatttcttgttcctaagcatctttcaaatccattcattctctccaacttcactagcatcacaggtagttcagtaaccatcatcccttccctagagaactgcctctaccttgagcctaattctctgattttattattatttattcctgttgtctgaaaccaggacaatatttctgaaatataatctattttaattttgagaatcgtaatttcagattatagaccacatagtttttggaattaagtaaaactggatttcaatctcatctataccagctatacgaatatctctgagtttcagtttcttcttctgaaaaatagaaataataatattaccttccttcattccctttccatttgtgtgtcttttgctcattcatcaggtctccaattagatgtccccttatctaggaagtctcctctgcctacccaatgttgggttcattgatcctcctatgagctctcttaggatatcctactttaccttgcagatcactgattacaatgggttgtaatgatgtatttactcatctgtattgccactttaccttgcagataactgatagtaatggattgtagtgatttatttactggtctgtttttccaagtagtctataaactctttgagtgaaaattattttttaccattttttcagaagcacacggcacactgcttggcttatagtagtttttctaaagaaaatgctgaatgaatgaaaactgcacaccactttgctttcctcctccatgtaaagtaggcattattttattttacaaatgaatcttaggttcaggagattaacagggccatgcaagaaatgtttgccattggtttgatcttagtcaaagaccagctcgttctatgataccagctgcttccttcacttagaaaggtgttgttttattgccatacaaccaacttgttgccattttatggccactcctgatgaatctctaaaggtggaatttcatgtaaataaaacatttaagttgtgtatattaaggttggtgcaaaagttaattgtgattttggccataaaataatggcaaaaactgcaattacttttgcaccaacctaataaaatagtaatagtagtgctccaggaagacaagagtactgtggaaatgtgtgaccctgtgaaagggggtatttacaaaataccatttacttgtttatataacgacttttgaagagagtctggcatacagtaaatcctctaccactgatatccacagtaattagcagtattattttcataggaaagactgtatcaggcagcccctgctttttcagcaaatttcaaaatagacatccacacccatattgggaacacaaaatcagttaatgcttccgatataaaagaggaactagctgtgcgtctcagaaattctcagcacagcctttaaggttccaaacatctgctagaagaggaatgcagatttaaactgagtgaggtgtggagtgggggaagttgattgggtctagaccaaagaactttgaggaacttgcccagagccctgcatgcatcagacctacagcagacattgcaggcctgaagaaaggtaggtccagggacttgccttcctaggctttcgggctgatggcttgtttcacttcctgggttaagaatttctgggaggggaatgagaagaataatgaggccacttcccatgacccaagctggtattcagggttggggtgggttgagtgcacctttaaatgtgcattcggtggggggatgaggaacagtttttgctacagtcgataggagttagaaaagcctcctaaaggctgacattggaggctggataaggttgtttagttacttttgtcccctgagtcttcaggatatcaaaacactgaaagcaacattttaaacctttgactagttacctcatctactgttaatgcccttcttctgtggtctttattctctgtgtctgactggttatttttataactcaggatttaagaacagatgtatcacatgcagaatttggtgtacatggagtagggcacaggcagggtccccagccttgtacatttagatgggctgtggcctgacctagttctccagtggtctttggcactattcatggggcacccaggcagtaaactgaggctgctcatgataaaatctgctaatgaaaaacaccttgtagacttttagcattcttaggataagaaagaagcttgtaagtggtcgtggccattgtaatctttccccagatgaagtaaaagaagccaataaaagggaaataatgtacccagaatcacacaagttaacaaaagggctgggagaaaaacaaaaacaaaaacaaaaacagaattcttggttcctagcccgggcctttcccccttttcccttcccatgccaccacttctgcatccccatcatccttctaaaaccatccagattcaggcctcattttgggtttctagtctatttgacaactttgccaagaaaaacggatggctgtttgtaccactctcctcatgctctctccttgcaattgtgacccatgaggaggatggtgacataaaaatgaggaaataagagactggtggtgctgctgatccacaaggtgactggggccaatagaagagggaagggtggtctgggtttccccacctctttatcaggggtgtgggggaaagacattgtatttcttaagagcctgatgcatataggtgatgtggcaaaaccaaggtttaaattcttctccaacctggaagaaatgtccctcatatgcatccaatattctcagcagttaaaaaaaaaattgaatatagagaagtcaagccctggatggtaaacacgtttttgttcttggggacttcatgtgccgtagataattaacacaaggatttctgtggtggaaaaagaggaggcagttatatgaatttatggccagagtttcttagaatgacaaagcaccagccttgaatgaccagaacctgacctatgttaccaaagaattatgggaaagcataggagtcagttacaagctttattttgatataattgctctgccctcgaggaagcttacagtcttaccagagaggcactaaacacagagagagaaccaccagtgcgtttgataagacagacccaacatgtcctaaattctcagtctgaaggtgtgcctgagagattgaggcagaggttcttttacattaaagaagaataaagtacacatttagatggactaagaagaatcatctttagtcactttccaaataactttgacttttgcaatgtagaaggaacataacacatttcttaaacccttatttaccgtcataggctgactaatccacatgtgggcaatggtggggaagtgggggaatagtgtctgagagaagatagagactataaaatgctgttcatgtgtgagaagattagatgatgtggtgggtttgtttttgttcttacaaggtggtcacaagaggggtggaacattcctgcaaatggtttcaatatatgcagatgtctcgatataggaatgaaattacgtctttggaacaacttaaataagtcaaatatacttggagctttaaaaattaaaaggagagagattcgaggtaagactacaatagatttgtgctgaagtagccgagcttttgttatcaacattaaaaattttaactttatgctaagggtggtgaaatataaaagaaggcttttaaaggggatggtgactcaattgtttttgtatttgatcattctggctacaacatcagtggtggattgaatatccaaagccacaaatggacacagggaacattcagaggctataatgaatacttctgataaaaatagaataatggcttgccttgagaagatgggagaaatacacagagttgaaaaatggttgtgtaggattagaatgagattgattgagcatagagggtaggcaatggaaggaaccaatgacaaactatcagatatttttgagacagggtctcactgtgttgcccaggctggagtaccctgatgccattgtggcttactgcagcctgggcctcagcctcctgagtagctgggattacaggcgcccaccaccacacccagctaatttttgcattttgtgtagagatggggtttcaccatgttccccagtctgatctcaaactcctgggctccagcggtcctcccaccttggcctcctatactgctgggattacaggattgagtcaaaatgcccagctttaaacttccagatttttaacatggatagtgtagttaattgctggaccttccaccaagaaaggacacttgtaatttcatagccctcttagggttcctgttccctttagctcttgccactcttgattagcaactacttacagggctctgaaataatctccacataggaagatttgcgccaccttacttttttgaaagggaaattttgaggaagactggatgtcttctatttaggtcttctaaggtttgaaataaaaataacctcttctcccttctgggacaagtaggtaaattgtcaatttatgggctttattagaatgactttaaattaagcccagagaaggacaattcccttaagtgtaacaaaatttgaggatgtggattaaatgtaagaccaaaaataagacctattttattttagccatatgctccaaatctaaattttgtgttctgtctaggaagtgctaaagtgtatatataggtctgaatatacctactccatcgcatataaatgcaaaccacctcacaaattccattatcattggaacagagactgcaagaggaagacaagggcctcttggcccacctctacgtagtcttgttatctaacttattccaaattgggtggtttctaccttttagctattatagataatgctgctaagaaaattaattgtacaagtttttgtgcaaacaagagatcttccattcaccagactagtttagtggatccccttaagcaaaggagttctggaattacatcacctggatttaaattttggccctgccactgtttactcaagttacttaatcttgtgtttctataattctgtcctgtgaataatagaatatatctctcaggggaatttaatgatgaaataacacatataaaacatttaaaccagtgcgtgtcacttaataaatgctaaatacatattgactattattactggtattcctactatcacttactcatttctggcttgaagtataaaacataaacttcctttaacacttcctgccactcaaggacatgctagacagggactttactcctgtcatgaccctgctccaaccttctccggtcttggggaaaatagaaaagcagataagaggggtctatataattggtgagagcatgtttttcatggtaccatgtggtcagaggttgactcttcctctcttttgcagtttgtctcaaagattggtcagaagagtcaggattgtcctccttttttgctctcagtaagttagatacaagactatgcagaggcgggcctagaggctctcctcttcctcttgcagtctctgttctaatgataatggagtttatgaggtgggttacattcacatgctatggagtaggtacattcagacctatatcgacactttagcatcctctgagcagaacacaaaatttagatatggatcaaaggggtaaaataaaatagcaggccttattttttgtcttaaatttaatttgtactcgcaaattttgttaaacatcagagaactgtccccctctgggcttaatttaaagtcattctaataaagcccataaattaacaatttaccaactgccccagaagggagaagaggtaatttttatttcaaacattagaagacctaaatagaagatattcggccttcctcaaaatttctctttcaaaaaagtaaggtgttacaggaaaagtatgtggaaattatttcagaaccctacaagcagcctctaatcaagagtggcaagaactcaacgtaacagaaaccctaagagggctatgggactgcaagtgtcctttcttggtggaaggcccagcaattaactacattgtctgtgttaaaaatctgtaagtttaagtttgggcatggtggctcactcttgtaatcccagcactactggatgctgagacgggaagatcacttgagccctggagtttgagaccagcttgggtaacatagagaaaccccatctctacaaaaaatacaaaaattagctgggtgtggtggcacaggcctgtaatcccagctacttgggtggctgaggtcgaggctgcagtgagtcacgatagtgccagtgtactccagcctgggcaacagaatgagaccctgtctcaaaaaagtctggtagtttattggaggaaccagtccccaatatttcaacataggttcttttctattttccctaagtgtcagccagtctgagaaataaagagaatgagtacaaaagagagaaattttacagctaggcctccgggggtgacatcacatatcagcaggcaccgtgatgcccccgagctgcaaaaccagcaagtttttattagggatttcaaaagacgaggaatgtacaaatagggagtgggtcacagagatcacatgcttcaaatggcaataaaagatcacaagggcagaagggcagagcaaggtcacaaggccagggtgaaattagaattactaatgaggttccatgtcctgctgtgcacacattgtcattgataaacatcttaacaggaaacagggttcaagagcagagaaccagtctgactacaattcaccaggctggaatttcctaatcctagcaagcctgagggtgctgcaggagaccagggtgtatttcatcccttatcttcaatcgcataaggcagacacccccagagcggctgtccataggcaccccctgggaatgcattctcttcccagggttattccttactgggaaaagaattcagtgatatttctcctacttgttttctgcaataagaaaaatatgactttgttctgcccggccccgcaggcagtcagaccttatggttatctcccttgtttcctgaacatcgctgttatcctgttctttttcagggtgcccagatttcatattgttcaaacacacatgttttacaatttgtgcagttaacgcaagcatcacagggtcgtgaggcaacgtacatcttcagcttacgaagatgacgggattaagaaattaaagtaaagacaggcataggaaattataaaagtattgattggggaagtgataaatgtccatgaaatcttcacaatttatattcagagattgcagtaaagacaggcataagatattataaaagtattaatttggggaactaatgaatgtccatgaaatcttcacaatttatgttcttcagccatggcttcagccggtccctccgttcggggtccctgacttcccgcaacagtagtttgttattaatgacttctattacccaccctctatgctcagtcaatcattaaatgatgaccttctttgcctcttttgacagtttttgacttgaagtttattttacatgatctaagtacaggtaattattctctttaggctagtctttgcatggaacagtccatcccttaactttcaactatgtttcttcttaaggctaaagtgagtctcttacagcatctggttagatcttgttttttaaaaattttccagccgctctttgacttttgttcaaagatttaattcatttatatttaaggttagcattaatggataaggatttactagtgacattttattattttgggggggtttgtttttgtagatatttgtttctttcttgtgctctggtctacctttgtgatttagtaattttatgaattgctaagctttgaattctttaacgtttgtgtatctgctgtagttctttgccttgtactcatcattaggcttacataaaaccacgtagttttataaattgactattttaaggtgacaataacaatgtttgttgaaacaagaactctagacttgtactgtcctcccacaaaactaaatttttgatatctttgttttctgctgctgtaaaaaaccattgaagactgggtaatttattataaaattgtattttgcttatagctctagaggctgggaagtctaaaggcatgcatggtgtaaacctctagtgaggataatcccatgaaggaaagtggaagtgagcgtacaaagcagagagagagatggggccaaatttattcttttttcaggagtccactcctgtgataactaaccttctccaaggataatgacattcatccattcatgcaggtagaggtctcctgatgtaattacctcttgaaggtcccacctcttaatactgttaaaatggcaattaagttttcaaatgagttttagaggggacattgaaaccatagcatctcatctacaaccctccaaaactcatgttcttctcacatacaaaatacaatacttctgtctcaatagcctcaaaatttttacccattccagcattgactctaaagttctaagtccagagtcacatcagaagcagatatggatgagactcaaggtatgatttatctggaggcaaatgtttccagctgtgagcctgtgaaatcaaaacaagtgatttgtcttcaaaatataatggtgaaacaggtgcagaatagactttctcagttcaaaagaaataactaggcaagaaaaaggtgtaagtggtttcaagtgagtccaaaacccaaccaagaaaacagcattaagctttannnnnnnnnnnnnnnnnnnnnnnnnnnnnnnnnnnnnnnnnncaccttttctgctgcccaccttttctgctgccatgacaaccatgcaaggaatggaacaggccatgccaggggctggccctggtgtgccccagctgggaaacatggctgtcatacattcacatctgtggaaaggattgcaagagaagttcttgaagggagaacccaaagtccttggggtaagttgcaaatctaggggaagaccaatggtgttgcaaactcatatttcataagacctaatgccaaatacactgtcccactagcctcataatacaacagccaaccctcacgacgtcagtaattacttttcaggctcttcatctgaaaaactatatagtattctgtcacaacatgcttccagttgagttatatttaaaatatattgagttcagatctattctagggttgtgggtcatccatgataattgtatttaaactcagtgtggaaaagcagcaaaataaaaggccacctatgcactactagctgacgccccctttacaggccttcctgatagctgacaggcacatattgctactatttctttctggcaccttttcttagccccctgctcagaggatgaaaaatctatcctctgagcatttccatctggagtctcagatgagcatgcccaaaagaaatgaaggattaaaagaatgacagaatagggcaggtgaaaggatatnnnnnnnnnnnnnnnnnnnnnnnnnnnnnnnnnnnnnnnnnnnnnnnnnnnnnntaaattaggtttatcactagcccaagcttcaaaccacggngaaaatgtcactgtggatattctggatccttttttcacattattcattttctggagggggggaaatatagttatttctcataaaatatgttatttatgttggcacatactaggtttgtttgtttatttatttttaattttattttttgagatggagtctcgctccatcatccaggctggagtgcagtggcacaatctgggctcactgcaacctccgtcttccgggttcaagagattctcctgcctcagcctcctgagtagttgggattacaggcatgagccatcacacctggctaatttttgtatttttagtagagacggggtttcagcatgttggtcaggctggtcttgaactcctgacctcgtgatctgcctgcttcagcctcccaaagtgggtttattttttaatgtatgaataattattttaaaatatactgtatgttttagagcagttttaggcttaaagaaaaattgagagcaaagtacagatctatcccatatgccccttgcccccacaaatgcatagctttttaattatcaacctcctccaccagcatgtaacctttgtaccaattgatgaactacattgacacatcattactaaaagtacacaaatcacaatggggttcattctctgtgttgtgtgttctgtgggttttaacacaagtatagtgatatgaatctacctttgtagtatcacatagtatcccaccaatccctggcaaccacaaatcttttattgtcttcatagtttgccttttccagaaagtcatacagttggaattgtacaataggtgttttttttagattgcgttctttcacctaaatacatgcatttaaatttcctccatgttttcttatggcttgatagctcatttatttttagtactgaataatatttcattgtctagaagcaccacagtttatttatgcattcacctactgaaggacatcttgatggcttcccaactttggcaattaggagtaacattgctataaatatctgtgtgcaggtcatgtgtggacataagtttttcaactcatttggttaagtatgattagtgtattgtaagtaagagtacgtttagttttgtaagaaactgccatactgtcttccacatggccttgtcactttgaagatttcaatcaacagtcaatgagttcctgctgttctgcaaaatctccagcaattggtagtgccagtgttctggatttttaccattctaacaggtgctagtggaatctcactatcatgttaatttgcatttcccttgtgacataagatgtggaccatcttttcatgcgtttctttaccatctctatatcttctttcgtaaggtgtcttgttaaattctttggcacatttttaatgaggacgtttatgttcttattgttaagttttaaatttgttgtatattttgggtaacgatcctttgtcagatatgactcttgcaaatatcttctcccagtctgttgtttgtcttttcatctcttgacaatgtcttctgcagagcagaactttttaattttaagaaaattaagatgatttattctgtatttcatggtttgtgcctttggtatcgtattgacaaattcatcaccaaacccaaggtcatctagattttggcctatgttatctgttaggagttttatagtttttagtttaatatttatgtctgtgattcattttcagttaatttttgtgaaagatataaggtatgtgtcttttattcttacttatggatatcaagttttaagtactattttttaaaatactttttttttcattgtattactttagctcattaccaaagatcacttgactatatttgtgtggctctctccaggctttctactctattccattatctatttgtctatttctttgctaataccacacagtcctgattactatcactttatagtatgtcctaaaattgggtagtgttagtcctacaactactacttcttcttcttcttcttcttcttcttcttcttcttcttcttcttcttcttcttcttctagattgtgtttgctattctgagttttttgccattccttataaattttagagtcagtttatcaatatatacaaaataacttgctgggattttaatggagattgtattaaatctactgatcaagttggaaagaactgacatcttgacaatgttgagtcttcctatccatggacatggaatatctctccatttattttatcaaagtttgtagtttcttatagattttgtacatttttttttagatttatacctaacaaatgccaaataccaatacctaaatattttatttttagaggtgctaatttaaatggcattatgtttttaattccaaatttcacttattcattataagtacataagaaagtaattgtctcttgtgtattaatcttgtataaatcttgtaaacctaatataattgtttgttagttccaggaatttttggttgattctttcagattttctacacagacatcatgtcgtctgggaacaaaggcagttttatttttccctgaccagtctgtatatctttatttccttttcttgtcttactgtttctgctatgacttccagtacaatgttgaaaggagtagtgacagggctcatccctgccttgttcctgatcttagtgagaaagctttgagtttctccattaagtatgaagttagctgtaggtttttcacaaatattctttatcaacctgaagaagttctcctctattaataggtttttcaagagtttttataataaacaggcattggattttgttcaatattttttctgcgtctgttaatataatcatgtgatttttcttctttagcctgttgatgtgatgaatacattaatcggttttttgaatgtatagtcagtcttgcatacctgggataaatcccaagtggtcatggtacacaatttttttgatgcattgttagatttagtttgcagatattttgttgaggatttttgcatatttgttcatcagagatgttggtctgtagttttcttttcttgtaatgtttttgaatgatttttggtagatggtagtgctagcttcagagaattagttaaggagtatgtcctctgtttctattttctgtaaataatggtataatttttttcttaagtgtctggtagaattcaccactgagtccttctaggtctgatgctttctgttttggaaatttattaattattgattcaatttatttaataattataggcttattcagagtgtctcttcttgtgtgagttttgacaaattgtctttaaggagttatccattttatcaaggctatcaaactgtgggcgtagaattgttcataacattattttattatccttttaatttctatgggaactgtattgatgttccttctttcatttatgttagtaatttttgtcctctctctttttcttaggctggctagaggctttttaaattttatttatacatacatatatttttaaaaactgctttggattttattgattttgtttattcatgttctgttttcaattttatgatttctgctctaatttctattatagctcttcttctgtttatttggagtttaatttgcacttctttttctagtttcttaaggtagactctcaggagattgattttagatcatgattttctaatatattcattcaatgctatatatcttcctctaagcattgctttcactacatcccataaattttgataagttgttgaaatgtttttgatcctttggaatgccatgggataatggtactcttactctgctacgtttagatccctgtgtactcatacttgtgtcctcataccccagacttcaagaaaatatcatatttgcttttcttgttttcttcccttgtatatactctcctttcttcaggttacttctccttgctacaataattgctttataattcctaggccacttctctgagctcatgagaaaaaaagagaaataattgtggtagaagtaacatcgtaggtatcagaaaagcacctctgggctggttctggcatactccttttaaccttgaaattattggcaatgatagacgtcgcgagagataatattggtaagattacattcacggttatttatgtgaaaaaagagtgataagagaatactaagaaggtcatatgactatcaaatgaaggagaataaggatagcttagtgattggaaagggggtggcggaagcaccatttttgtggtggacaatcagtttttgctttcttcaccatttttaggttgtgcagattctgactgccctgatgagccttagcatgggaataacaatgatgtgtatggcatctaatacttatggaagtaaccctatttccgtgtatatcgggtacacaatttgggggtcagtaatggtgagtagagtatcttttgatataattgaagataacataaagcagttgtcaataccctgatctttggaatcctattctaaccgtatcttgtaattctgtaaatctgagagtggtatctaaccatttcttactcaattttctcatatttaaagtactacaaataatatagtattatattaaatctaggcagattaaatatttatatatgtcagttagatatattacagcagcacattgccaaagacccaaaccagaatggcttaaacattggaagcactgattatttcacaacaagactagtggcttatcatttctaggatggcttcattcagtggtgcaaggatttcatcaaggattgctagcagaccacatcagaggggagatggttgacacatccaacttttggtaaatatttcatatacatattcccaaatcaactgtcagtaaggataacggacttgccattattggcttggactaatcaagatttacctctgtagctgggaggagtctaccctacctttagctcatgagaaactgaacaaaatgatggtttagttagcaaggaagaagaggagatgtggctggtacacaagcagtttctaatatctagtctactgactatcgaaactcaggaaattgttacctcagaaaatgaaaatgttatttgatatattttgtttcataaattcaataaaataactaattattataattaatattaaattaattataactattattaatattacattaaaattagaattggaatttaaatttaaaaaccttctcccaagagaaaacacaagatagttttaatgcaaattgagagtaaaattgagaataaaataccaagttttatccattgaagagagaaaaataaaatttataagttgggtttatgttagaatcagggaatctattctagcattgcagggtttccatttatttctaaaactgagaatgaggtagtgtagagttttatagaagagcttgctttttgatccccttcacctgtttacagcagaagtgcaagattggaagaacagtaaagctgtgttttacttctagaaagctgcacaatacttcatatatccaaaaatactgatgccaataacagctcttattaaactcttactatcatgtggacactctacttagtgctttatatgtgcaatttcatttcaaacaatcaccacgaacttctgatttttcattataatcattttatggatgaagagaggttaagtaactaacccaacatcacaactgcttggtacaggaatgaagattcaaatagggtcaatgtattttcagaattgcatacatctaactacttagttttctgtttttatttccgtttccttttcaagatcacattaaaaaccagcttacatggtgcaagccttccacacatgttcagtagattaccaggaactgcaggagccatttgtccgctgagacatcactgagactttcgtaggtgttccattagatgagcctttacttaattggtgaactcttttctgcggctaccttccattattctttcaacctttttttccaaacctcttctatgaagtgcctcctttttctctttcatacagtataagtaccaataccaagaaccagtcacaagttcctcttatttttggcctcttcagttctgtttctgtatatgtttcacattccttgttttttcctctgagatagtacatacatactttttcctgtggcaaatgaagtcctcttattcaatcccatcttcaaatacacagacatacatacacacttgtaatgtgtatatataatttctgtatagaatgtttttccaaggtgccttattgaatttttagaatagtttatggtaatttttagttcacgttcttgaatgtttgcaatatatattgttcatacttaaataagaatagttaaaccacttgttccaactatttttcttatgtaattattttggtaaatatacccagaatagtattacataatagtcagcatctttatcttgattttgactttaatgaaatgatcctacatttttatcattaaacataataaagacttttagactgagacagatttctatcatgttacagaaattacaattctttttttttttttttttttggtttttggtttttggttttttgagacagagtttcgctcttattacccaggctggagtgcaatggcacgatctcggctcactgcaacctccgcctcccgggttctcaccattctcctgcctcagcctcccaagtagctggaactacaggcacccgccaccacacccggctaatttttttgtatttttagtacagacggggtttcactgtggtctcgatctcctggtctcgtgatccacccgcctcagcctcccaaagtgctgggattacaagcgtgtgccaccacgccctgccaataattctttatattttaccagtaatgttgcagttactaataatgttgaattgtattaaatgtcctagcatatcaacactgtaaacatgaatagcaataagcctgtnnnnnnnnnnnnnnnnnnnnnnnnnnnnnnnnnnnnnnnnnnnnnnnnnnnnnnnnnnnnnnnnnnnnnnnnnnnnnnnnnnnntgtttgtagagctgaaggaacatcccaaatgttcatgatgtattttatatcatatgatgggtgattccctctagtggttttattccagtggtgatttagatatcatgaatcatctctatgtctgggtatttggaagttaaataaatttattgagcttttttattagttctgtattttttatattatgatataatctttgaatcatctgaaatcaaatttgaaaagcaaattaaaaactccaacaattgaatattaaaagatagagagtctaaccaacttgactagttattttagctaaatgaaaaataattgcctattgatggaatcaaatgaactactatattctagtcatcatctaattgggaatttacatttttttgctactattttgcttataagtttaaaaatattggccgggcgcagtggctcacgcctgtaatcccagcactttgggaggccgaggcgggcggatcacgaggtcaggagatcaagaccatcctggctaacacggtgaaaccccgtctctactaaaaacacaaaaaattagcccagcgtagtggcgggctcctgtagtcccagctactcgggaggctgaggcaggagaatggcgtgaacccgggaggcggagcttgcagtgagccgagattgccccactgcactccagcctgggcgacagagcgagactccgtctcaaaaaaaaaaaaaaaaaaaaaaannnaattctaaatgagaataattttagtgtattttttgtttaaatatagtcatcaattttggtaccatgtaagaattactttgtatcaggagtttggaaactatcttttagtgccctcaaacagttttaatatcatttcagttagatatttgaaaaacttgataaattctcccatggatttatctggtattatttctctgttctttctgggaaaagggaaaataatgtgcaaacctttgtggttttctttaagataattggtctgattaacatatctatctaatttagaattaagtttagtaagttatgactcccaatactggcttaaagttttttaccttcattttttctctcatttttagtttattatttcaggatccttgtcaattgcagcaggaattagaactacaaaaggcctggtgagtaatattttctttttttggtatcaaaaaaaggaaggattaataaaaaatgtattctgccagggtgtaaaacaggttttgtttctttgtttgtaaaaaatcaggagcgattgtgcattttacctactagaatctgtctttcaaaaactgcagtcaggctaattgctgacataggactggatattttggcaaggtagggaatcttacgcttgtggagggaatctttttgaagatatagagaattattgagaagaaatatcaagtgggaccgctccaacaaaaccctgcagcatgagtcagcccatgatagtgacaccaagcattggtgttgtgtaatatttactgacccattgattataatgtagactccaactgtgtccagaaaggattttgagttttcaataaaagaaattcacaataaggttattacataagaagcaaatttaaaatgtaattctcatgccaagatgcctttcataaagccaatacaatgcgaaagtccatatctgaataaatgtttttttctagttaaagtccatatttgagttttctttgttcaaaagataaatatcaaattctggagcatgatcaatatgggttttccaaatctggcctaacccaactccctagtgtcccctccggctgcagccacattactcatactcctcacactttgctgtgcaagtttagttcttttttgtttgttttttttctggtttttggtttttggttttttgagacagagtttcactcttattacccaggctggagtgcaatggcgtgatctcggctcaccgcaacctccgcttctcaggttcaagtgattctcctgccttagcctcccgagtagctgggatcacaggcatgtgccaccacgcccagctaatttttgtatttttagtagagatagggtttctccatgttggtcagactggtctcaaactcctgacctcagattatccaccccgcttcggcctcccaaaatgctgggattacaggcatgagccactgcgcccagtcagcaattttagttcttattaaaagcctccttacctttatccatgagaagagaacgtacagaaaagaatatactgctgagagagataatatacaaaaggtatagaggcatgacaggcaaacagcatttagaaaaatgataagaaatcaggcatcagaagcaaggagtggcagggaaggacacagacagggctgtccagctaaagtgtgaaggacattgaaaaccctgctaaagagatttggagattatattatgtgcccacgggaatcatctgaagaattgaagctgcggaataatgagatcatgtttgtgttttgccaagagattagagttgaaaccacaagacaagttagaagactattgaaataatcaagataatgatagatggcagtaagaaagagatggtgggtgtaaagtgattcatggagatatatctgaggatgttgttggattgtttaattgattttcattcctttctaggtccgaggtagtctaggaatgaatatcaccagctctgtactggctgcatcagggatcttaatcaacacatttagcttggcgttttattcattccatcacccttactgtaactactatggcaactcaaataattgtcatgggactatgtccatcttaatggttggtactgcctcttttcaggggatattattatagaagcaagtttggggagtgctggctctggcaaagacaataattaatattccctaattgatgaatgactttgggaagttggagtgattgagaaatagaataatctttcatttaggagttaggtacatgtctcatctctgtctttattcttctatatatcatgaggcaaaatgggaagaaagcttatagttatagaatacctactcattaatagttactgtgctgggtattttgtatacatttttctgtttaattttaaaacattgatgcagtacgtactgttatcccctctaaaaatggggccctgatgtcagtccctattctctaataatgaagtaaaattgtcttgaacagtattttacaagtggtgagtagctcagtatcctttccaacatctttggatgttcttgcaaggttaaccacttttatcctcaacatctagctcctgataaatctcagtcttcattatgacttttactacttttttgtaccaattgttcttatcttaatgctatcctaattgctttattctgaaaatgccacctacacaatattttgtaggtagtaaaacttcttgatattttgggccattgggtaattgtggggaggaaaagttattgcagcacatcacagcagactaaaatgcacaattaaatctttattattaaaaagcctggcagggcgcagtggctcacgcctgtaatcccagcactttgggaagatgaggtgggtgggtcacctgaggtcaggagttcaagaccagcctggccaacatgatgaagccccgtctctactaaaaatacaaaaattagccaggcatgatggcacgtgcctgtgatcccagctactcggggggctgaggcaggagaattgcttgaagctgggaggcggaggttgcagtgagccgagatggacacattgcactccagcctgggcaacagagcgagactgcatctcaaaaaaaagagaaagcctattggtcattttgaacacctgcaaattttttgttactttccctctatatgaactttcagcctttcaccttgctgcttagttctcttccttaccacgttcttcgcttatgtaaacgtggaaacccaacattcttcctaacttactaagcagaatcagttgcattctgtttacttcattcctagctaattctacatagttttgtgggctatataatcacaccaaaataaccccttgaggtgtctttgctaaactaatttacttcccttgagatttctattgctttttatagtaagcaattttacttcttgccactcgctcaaaataagaaaaagcttctatagagaatttgacaaattctttcaaggtctttcagttagaaactggcaaaaggaagattagattctacaatttcttgtctctaattcccctattatttgctatttgtatcctgcagaaggaccttacttttagtttacgaagttctcttcattggtagattttaagggcacaatgatagagacaaaatctggaattggccaacttgatagggctgatttcgtgggcatgggacctgtgcagttactcaggacttcacagttaaaagagccctgtgcttgatctaatgctctgctgttgctatcttaaaattgtttttaaaaattttaaacaagagaatctaaattacatagctggtcctccattcatctcaatcacctttcccagagtccatgatgaattcctgttaattgtgtgaacatctttatgcctgttcttatagcagaggacctccataagggcttcctgggatttgaagtaatggttctattcttgcctgggcacctgcacaatcagtccacaggtctatatacatgctacctttttttggaggcccagccctgtacctgtttttgtaaataaagtttcataaataaagtttaattgaaatacaacgaagcccatttgtttacatattgtggagtgctgctttcgtgttataacagcaggtttgagtatgtgtgacagagaccttatggtcggcaaaatctaaaatgtacattatctggcctttacagaaagcttgccgtcttctagtctacacttctagatggtaaaatccttgaagacaggggaattgtctgttttgtttgctgctctatcttctgtgcctacaacaatgttggaaacacagaggccactacagctgttgaaggcacaagaaaataaataagcaatgaatgcaaatattctcaaggtctccttaagtctgcctcactcatatcctgagctcttggtctattggctcttctgcaacagagggactatccctaaccatggagagaaaaagagagaatatttaaaccagataatccctgcatcaatccgggggaaaattaatagaaataagtgtactgcccaatgttttccaaattttgaccatgtttcttggctgaagacnnnnnnnnnnnnnnnnnnnnnnnngtctggatggcatggtgctcctcttaagtgtgctggaattctgcattgctgtgtccctctctgcctttggatgtaaagtgctctgttgtacccctggtgggnnnnnnnnnnnnnnnnnnnnnnnnnnnnnnnnnnnnnnnnnnnnnnnnnnngaattcagaaaagcagtggttttggggcatatgatagctaggtctctatctcttcctgttcttccaccaaccctatgtcacactgactttgtggaagaataaccagaactcttcttagttttgtgatgtgtgggccagtgtggtttttgcaatgtattattcataactagcaaatcatgatttgggtatgttgatgtcatcagcatgaacaacctggtttggaagaagagccccatatttttcataacaccttggtttacccaacgtactgtgcactgtcatccacacgtaatattgatccacttgcgagaccagagcagtggtcatcagcagctcaggtcaagagctatcactgaatgttgtgtcctaaatcaggcctgatcaagagagtgactgagaaaccccacatacttgatcttgagaatgaatcagagaagaaaagagtaaactctgataatgatgactttatgtgggcaggaaaggggcactctgaggtgatttgggtgactcacctttggcattctgattgtttcacaggttgtgttaattctgccatcacattctcacatggcagaaacagcatctcccacaccacttaatgaggtttgaggccaccaaaagatcaacagacaaatgctccagaaatctatgctgactgtgacacaagagcctcacatgagaaattaccagtatccaacttcgatactgatagacttgttgatattattattatatgtaatccaattatgaactgtgtgtgtatagagagataataaattcaaaattatgttctcatttttttccctggaactcaataactcatttcactggctctttatcgagagtactagaagttaaattaataaataatgcatttaatgaggcaacagcacttgaaagtttttcattcatcataagaactttatataaaggcattacattggcaaataaggtttggaagcagaagagcaaaaaaaagatattgttaaaatgaggcctccatgcaaaacacatacttccctcccatttatttaactttttttttctcctacctatggggaccaaagtgctttttccttcaggaagtggagatgcatggccatctccccctccctttttccttctcctgcttttctttccccatagaaagtaccttgaagtagcacagtccgtccttgcatgtgcacgagctatcatttgagtaaaagtatacatggagtaaaaatcatattaagcatcagattcaacttatattttctatttcatcttcttcctttcccttctcccaccttctactgggcataattatatcttaatcatatatggaaatgtgcaacatatggtatttgttaaatacgtttgtttttattgcagagcaaaaataaatcaaattagaagcaatactttcatgtgctacctacttccttttcagatgcaatatggtggaaagagactaagcgttgatgtcaaaaatacagtatggtggtaaataatgtgggttttctaaacagacaaccctgggttttcatcttgctatcccatctttgttgtttactacttatgtagctatgaagatgccacaaaatttctctgtgcttcatatttctttttaggaaggtagtaataatattgtctggcccatacacctatgataattacttggtataacaaaggtagaaaaaccaggactctgactggtacatatggagccacgaaagttttaattaatatatatacatgtatatatgtaaatagatatgtattagatatatatatcaatttatcattttattcagcatatatctgtaaagtatctgtaatgaggcagacattgttttaagcatataagaaaatagtggtaagagagataatatcttatatatataagataatagtggtgaataagagagagaacatccttcctctcttgtaggttaaaacttttatgggacaggacatagattaacatataaacaatcaaaacctttttatatgttgttagaagctaactggaagaattaatgtgctagagagtggctgctgtagtggtggtgagagatgagtcattagaatgtacccaggaaagttttttttttgaggaagtgatattttcattatgataagataaaaattattgaatttgcacggatattcgtattttccaattcagtatatagtatttctagatttctcattctgccctacactcacatatctattgtatccacctttctccatgcacgcttttcatgggaatgtaagtccctccttctatcagtgctaacctgtctactttctccagctccagggatggataaggtgtggtaaaagtcagttaagacattctatcttcttggttgaaagttggaaggtaattagcaagaaccaccaaatagaacttaatactattgcttttctttctttttttttttgaattttttttttttttttttttgagacggagtctcgctctgtcgcccaggctggagtgcagtggcgctatgtcggctcactgcaagctctgcctccccggttcacgccattctcctgcctcagcctcccgagtagctgggactgtatacaagcgcccgccaccgcgcccggctaattttttatatttttagtagagacggggtttcaccgtgttagccaggatggtgtctcgatctcctgacctcgtgatccgcccgcctcggcctcccaaagtgctgggattacaggcgtgagcccccgcgcccggccaactgttaatattttaccatgtcataaagagatattggtctatgtatgtacctaattccaatcttttaattattgtgtatgtactgatatcctacttgttttatttcttcaatattgtattaatacttggcagattttgtactcggcatttattccccatttgttctgataatgatggcctgatttcctccaaaaaatcaccattatctaactcttaatttatgtacaagggtggagctcacccaacccccaatttcaggagttgacctgtgtcctacatctgggaagtggcagaattacatcaactcagctagagtgaagttctttggtagccttgtgacctaggaaaaaacaattgtgtgaatgactgacacatttccaatcaaaattaatctcatcattttcacttcactgaccaagaaatggtctccccatctttcctctttcctgttgggtttggagctgtgaggacgtaagtttgctgccatcagcagccccgtgacagacagatgctcacagacaaaagcagaactgagaagttccaagtgaacgatcagaccctaatgtaattcttttgagtctccaagtcaagttttacccggagttggcccaacccctggggttttaaatatataaagacaaggaaagagatttattcagatagtgcaataactgggcaaaatccttcaacggcttcctctctaattcagaataaaagccaaagctcatataaatcctacatagtccttacatcacgtgattctttgttgtttcttggatttttaaaatatcctgacttatatcctgatatattgctttgagattgtttaaaatggtaagagagtgccttctcttggtgataattagtgcatacataatttttttaacacttacataagcaacctaagattagtgcatttttagttgtaaaaagttcatgcaaatattttgtgctattagtgcaagatattatgattccaacttttagacaagactacctgcacttgtttcatgtcatgtgatttgaaatttattcttcatttggttattcttggttttatctatatgtgattagaaagcagtaggaaaatgtccatgagactttgtctccttttgctacttttacaataaaaataattattgtttcataggtttttgtttttttttttgagagagggtctggctctgttgcacaggctggagtgcattagaacctctgcctcctggacttaagccatcctcccacctcagcctcctaagtaaatgggactacaggtgtgcaccaccacacccagctactttttctattttttgtagagacagtgtttcaccatgttgcccagtttgattccctgtctgcttaatgattgcaagaggctcccctgctgggttgaagttgggccaagaattgccttagtagtggttgatacggttgggatggtatggttaaagttgaactcatcattgagggaagcatcttgggaccgcacttcgccttgtaaataattggaaaaaaaaagttataaggtcttgagtatataaagtgatattattgataacttctaactataagtagtccaagctcttcaggtagatgcaagatatctgtgactaaaaatgatttttttaaaaaatttgaatccagtatttttgggttttttttttgtcttagactcactgaggcaaaatgaaggcttcacgctaagttaaatttgtgttatcaaatatttctgtcccctttctcctctaaaatctaatttctcttctctaccagtcctaaatatcaaagattataagaaaagtaaggataattaaagattaaagaatattgaggcttgtgtattttttcagtcaatgataaagaaacgggcgatcaataataagcaactggtaagtgtactataatcagcattgctacaaaaactgctatctattgagaaaacatgcatccaactattaaaagtaatttatatttataaaatcaaattaaacccactcgtaaatgtaagagaagtctcaaagggctcattgttataacagttataataggtatttttacatttgaggttgtaaaatgataatactgtatgcaaagttagaggcaaatcaacagttctaacagtgatgtgttacacttacattactcagtaaattggattatagagcatggaacaatttggggaagaatcatctcgggtgttcccactgaccattagaaatctgtagtttatcttaaattaactatttttaaaatttgccattttccacaactcttacttttcctgattctgagtcctgatcccataaacttgcaatactctatggaaaggatttcaagagagacatacttttatctttaataaaaacatgaattaaaccagaaggaaggaaataaagagttgaagcccactgctgtggctgctgaagtaatagatgcattttatcttaatacttgactagaaatttcctgtatcttcattttgtatcttattatgaatcttcatcattaaaatgtatgatagctttatggtaggtcttgaaatcaggtagcatatgtctcatattatttttcttcattaacaaaattgatttagtcaaagtctttaattatttcatgtacattttggaattacttcgtcaactttatgcaatccaaaaagaccttcttggattttgattaagaaggtattgagtctataggtctataagggaaaattgccaacttaacaatattgagttttctaatccattaacagaatataccttttcctttatttatttattatttttatttatttatatttttttgagatggagtctcgctctgtcacccaggctgtagcgcaatggtgtaatcttggcttactacaacccctacacctcctgggttcaagtgattctctcacctcagcctccaggtacctgggattacaggcacacgccaccacgctaggctaattttttgcattcttttagtagagatggggtttcaccatgttaaccaggctagtcttgaactccgtaaatgcacagcttagtgttagaaaacaaatttagaatacttccctgcagatttctggacctctgtctctgcatagctatcccctttatggttctcttctcactaattatagctgtctcactgccctcaaattctggtttttgtcttctgaatttggcaatatcagaatggatccctctccctgaccatggtctggaaagtttcttcatgcagaaaaccagagcaattattatattcacatttgttttcattttttcagtgttgaaagtccggcactgtttcccaatgtctggaagcagttgtgcttaatttttttccggttttatttatgatataaaaaaatttttgagacaagctctaactctaacacccaggtttgagtgcaatggtgcaatcatagctcactgcagcctcaaaatactgagctcaagggattctccaacttcagcctcccaaagtgctgggatcaaaggtatgggccactgtgaccagcgcagttttctaactgaccagagtggaagattaagtctggttctatcataattggaagagctgagtttcaactttaaaaagatgatcataggctgggcatggtggctcacgcctgtaattccagcactttgggaagtcgaggggggcggatcacttcaggtcaggagttcaagaccagcctgaccaacatggtgaaacctcgtctctactaaaaaatacaaaacttagttgagcatggtggtgcgcgcctgtaatcccagctacttgggaggcttggcaggagaattgcttgaacccgggaggaggaggttgtagcgagccaagattatgccactgcattccagcctgggccacagagtgagactccatctcaaaaaaaaagctcatgaacacagatgttagcatttttatttcatttgtttatatttaaaatcgatttaagcatgtcaacatatgtaacttaataaaattaatacttataatttaaaatattcaagcagaaaattgaagtattgtccttttcatatgctgatattttagtcaccttaattgggtttcataagaagcaactattaaaagacactagcatgttgcaattattttttatttaaattaatttgtgttattttgcaatgttttatatagtaatatccagacagttttaatatacactcaaaagttttgttttcacacaacataaatataggaaacacaatgagacaaagctatacaaattccagggaaaatatttaaatctttgaatttattaaaatatgtctctcagtttgaattttgagtttactgtaggaaaacacagaaatgatgtgtaaagtaacttccttttgattgcctggtggatagaaaaacaaaaaacaactaaatttgagatatggtttgaacagagctgatgatgcatttgttttcctgtttgaatctcctcaagatcagcaatttgtttttttactgactaaggtttgttcagattgctactgctcatatgattcccaggaacttaagtactttcgagtaactgtgtgaggctgataacactagatttaaaaaaaatttgtcttcaataagtacactctttccagcagaggaagcagttcagaaagttctttgtggtttcccctctggatctttctatcatcaatttcagcaaaaggtggtatttttcttttaataaaaggtcaagaccgcttgttttaatccttctcagactccaggtacagcttaaccagatatagcctgtaacttgctcccatctcttgaatgcatgctttcagcttggccaggaggggctggacatcaaaaggaggagagtcacagtctggatggggctcaggaacctcacagtgctgtataagccagctatcatctaggggggttcttttccccttaagccagcagcaaaatgcttcaacccttgtcaattactttcagtaactgattcttttgtcttgttttttttctacttagtattctctcccatatttagagaatactgaaagcattcccgttttacctctaactctgaagccacagaaactgtgcccataacagggttgctaaatggcctaaatgacatatatgcaaatatatatacacaaacacacatgtgtatggaatatatatgtttgtatattatttgaaaatatatttaaataacttgcatattacatataaatttatatatatttcatatccatatatgcatatactttttctcatacattataaaactctggcaacatctacatgtaacatatgagtctttatttgttttgctgacaaagattatctttcccagaatctggattagaaaatttagttatttagtatttggttgttattatttcaatattttgatttaatttattttggaacagaaattagcctgcaaattctgcaaatttttcttagaaatgtatcatatgcataaatttgttttagctgacctagaaaacggagggcttatatttccctttttatttttctatataaaagatatttgatttaagaagaaaatcagttcgaagtctttgtaaatctgatatattctcttttcccaattgtattgcccaagtcagagtctattattttccacaggcagatatttgaaaggacttaacaaataccacagaaggtactcacataaggcttttatctaaaggcagagagtacaatgcagcaagagagagagggcaagcactggagacattccaagcagtacaagacattccagatagtacaagctccccatagacctaaccagacacatgaaccatgccagtttctgacttgaactgcccagatctatgcaagaaactctctatatcccattaagtagtagtcaagcttgtcaaactcattaggctagttgcaagtcattagcaaagaaactgaccttggggcttgccaagagagtttaaaattattctaaactgcatattataaattctaatggtcttatcttgaccaagagccaaaattcatacattcaggcatccccaggattaagacagagctcttaagtacctctgtaannnnnnnnnnnnnnnnnnnnnnnnnnn

SEQ ID NO: 77 - DNA, 84248 bp, homo sapiens
  genomic_DNA (1)..(84248): n is an undetermined nucleotide (dATP, dCTP, dGTP, or dTTP)
  misc_feature (1)..(1): n is a, c, g, or t
  MS4A4E_initial_coding_region (18861)..(19004)
  MS4A4E_coding_region (23822)..(23950)
  MS4A4E_coding_region (34287)..(34343)
  MS4A4E_coding_region (35782)..(35940)
  MS4A4E_coding_region (40220)..(40321)
  MS4A4E_coding_region (42168)..(42236)
  misc_feature (65736)..(65736): n is a, c, g, or t
  MS4A6A_initial_coding_region (67182)..(67328)
  MS4A6A_coding_region (68944)..(69078)
  MS4A6A_coding_region (70593)..(70649)
  MS4A6A_coding_region (73298)..(73507)
  MS4A6A_coding_region (75780)..(75881)
  MS4A6A_coding_region (76656)..(76748)
nggataatattaggctaaatacctaatgtagatgacaggctgataggtgcagcaaaccatcatggcacgtgtatacctatgtaacatacctgcacttcttcacatgtatcccagaacttaaagtataaaaaaattaagaaatttttaaataagaaacctgaaatgtagatattctataggaaaagtgacatggtttctttaatagataaatgacatgaataaaaaagagtgggaaggggaaaatatagattgaaggagacttaattaacatatcaacaaaatgcaatgtctggcctttggatggatggggctggggtgttcttgacttaagaaaatgaacaaatatgtatgagaaaataataaaatttgaatatgaactctatattcgatgatactaaggaattattgataatgctgtaaaatgtgataatgatattagaaaatgttatggaataagtgtcatctgttaatgatccataccaaggtataaactagtgaggtgatattaaatgtgagatttactttaaaatactcttacaaatatgtgcagggtggagagagatgagaaaacattggcaaactatcgataattgttgaagcagactggtggatgtatggtaattcattatactaacctccctacttttgtgtgtgttttaaattttccagaagaaaaagtaaaagacagaaagtggtgatggtttcatgagtgtatatttatctaccaaatgatcaagttgtatacattaaatatatacagctttttgtatgccaattatacctcaataaagtggatttttaagacagataagaaataaaaataagatagataaaaactacacgtgattgtgaaattaatgaaatgagtgtttttagctccatcagttcagtttggttctttcttaaaatagcaatttcatgttttatctactgtactattttattgtattccttagattcattggattaggtgtagactttctgctgttgatgatctttgttcctatccatgttctgaattctacgtctgacatttcagcctttcagcctggttaaaaaccattgccggagaactagcggagtaatttggagataagaagagactctagctttttgagttgccagttcttgcacagctctcagtcatctgtttgtgctgatgttccttcaatctttgaagctgctatcttttagatgggcttttttttttcttttattgcctttgatgcccttgggggtttgattgtggtataagttgggtttagttgattggctttgattctagtcagtagactggctttgatcctagtcagttcctgggtattggatgaggcttccctgattactgtctctctgctcacatttattatgttgggcattctggtccacagaactcccttaggcaggggccacagttggcggacaagtagtatccttacagcttagcgctaatctgctgtctgaatgctttccagggtaacacagtgttgtccccacctatggagtttaggtagaagcaggaccactgggctataagctggggtgtctggttacaaaaggcaaagattggtggagttgcccaccctatcatctgggtgtttctggggcaagagaatgctgcacttcttggtaatttcaggcagaaagaagtagcactgctgagctggaagctccagcagatgtggctcacctgtctaccagtggtaggagtgggtagggctgtcctctctggcatctggatgcttcccagggaaacaggaggctgcacctgctggctcagttcacagagaagtaggaccactaggccagaactctagcaggcattgcccaccaggctaccagtggcagggttgggttgcatcacctgccctgctgtcagggtgttttctgtgattacaggaggctgtgccctctggcacacctaaagactgcaatttctggctgagttcacatataagaaggactactggtctggaagctctagcaagcattgcctgcccggctaccagtgtcgggggtgcattgcttgtccttcttgtctgggtgctttctgggacaagagtaggctatggctactggccaagtccaggcagaagtggaaatgctgggtaggaaggtggcacaaggaatattatgtggagattatttcagaaccctacaacagtccctaatcaagagaggcaagagctaaaggaatcaggaaccctaggagggctatgggactgcaagtgtcttttcttggtagaaggcccaacagttagctcaattgtctgtgttaaatgtctggtagtttgtcattgataccttctgttacataccctctatgctccatcaatcgtattctaatcctacacaagcattttttaactctgtatttctcccacctcctcaagccaagccatcatcttatttttatcaagaatattgcttacagcctctgaatgttccctggttttttatgtattctggatatatatcctttcttaattacatgtattaaaatattatctaatattctgtgggttgtcaatttttgctatgtatatttagaggttctgttattaaatatatacacacttaaaatgattacatctttctgaagattgtactatttttataattaaaaattaatccctttgctcatcagtaacatattttgctctaaggtcaattttctctgatcagttttttttgggttaaggtttgctcgatatatcatttctcatccttgtactttacagtttttgtatgcattaaaatttacttctttttaacagtaattagttcagttttgaccttttaaaattttatctgaaatatttgtattttattacatatgacgtatttatttatatatttgggattaaatctaccatcacactattgactttcctggaggaaataaatgttctaaatgttattagaatttgataaatcaaatacacatgctttaatttttaggattacaagaacacacaatgaaagactttataagtactaaaattaattagagggagaaataatgcaataaaggggtatatagaaccttcaatcaaaaaaatagaaaacatttttcgtttgttcatttgtttgttgtatttggtttctctgttttacgatattgattttcttaaatattcagtgttcatttacactttcatttggtaatttctcctatcatgtcagggaatgtaggtcttgcttaccatagcttacatcgggtgactgtgagagaagagggggcataaagccaggttatacatacagattggttgtgatgtagttgagagaaagccccttccttctccagactaaggtgacctctgtgtcttcatcatcaggatcccagctctaaagagtgagcgcaggactttcatttgggaatcaattccataatattctctgctttttgcttttcctttataccttgtgaatggaagcttagaccttaattcttgtctctttcctgttttttactcagagctggcactcacattctatatacttgtctagagcagaaccctaaaacagttttttggtttggttttttgctcataaaacagttctcatattttggtttggggataaactaccttgttaggtgatgcctgtgtgagggacagaggaacaactgaccccgcttttccaatataattttaaaaattaattaacaactgctctgggctctgacctactctgctgcttgttgttttgacactgaacttgagctcttttttatttgcttttatttgtatagtagttagttttgtcctatgcttatttagaggtagggtgattctatttatgtttctctgtcaaatttcaattttattgttctttatatcaccataaatcctcaatcacttgtctgctaagaataacactaataatatctcacttcacactatatggaagaggaggtaagattgacatctgttcttagtctagaatttcaacctctcttataaagtcatgaaactctgtacctttgtcttctgtaatgccacattttcctagtttgcctgttatcttctttaatctctttttgccatcctctggaaacccttatttctgataatactgtttctattctctagcaaaaagggtctgattttttctgcctcctcccacaagcctgggtaacctcatccctctgggtgaagagctgttgggtttacctctacagccatgttctcattccctagctcctgccagttatccaacttttgtgaaacttatttgaaggtgcccacacaattcaaattaaatatgctccaagtcttactctttgttcctgcagttctgtcttggtccatgtctattgccttactgaatggctctatcattcattcagtttcctaacccagaatctgagcgccatcctttcctgttttctctcctgatttacacatccattatatcaacaagtactgtcatttctcgttcctaaacatctttcaaatccattcattctctccaacttcactagcatcataggtagttcagtaaccatcatcccttccctagagaactgcctctttcttaaccctaactccctgatttcagtattatttattcctattgttgctttacatgaaaaccaggacaatatttctgaaatataacccatttaattctgagaattaaaataatttcagattatagacaacaaagtttttgggattaggcaaaactggatttcaatctcatctataccagctatatgaatatctctgagtttcagttccatcttctggaaaatgggaataataatgttacctagctccatccttcttccatttgtgtgtcttttgcttattcatcaggtctccaattagatgtccctttatctaggaagtctcctctgcctacccaacgttgagttctttgatcctcctatgagctctctcaggatatccaattttaccttgcagatcactgattataatgggttgtaatgatttatttattcatcagcattgccactttaccttgcaggtaactgattataatgggtgatttatttacttgtctatattgtcaagtagcctataaaatccttgagcgaaaatcatttttcaccattttatctgaagcacatggcacactgcttggcttatagtagcttttctctaagaaaatgctgagtgaatgaaaattgcatgccactttgctttcctccatgtaaagaaggcattattttattttaccaatgaatcaggttcaggggattaacaaggtcatacaagaaatgattgccattgggtttgtcttagtcaaagaccagcttgttctatgataccagctgcttctttgacttagaaaggtgttgtattaattattgctgtacaaccaacttgttcccattttatggctattcatgttgaacctccaaaggtgaaatatcatgaaaataagatatttaagttgtgtatattaaggcacaattactttttcaccaacctaatacaatagtaacagtagttctctgggaagaagagtactgtggaaatgtgtgaaattgtgaaagggggcatttataaattaccatttacttagttgtgtatataacaatctttgagcagagtctggcaaacagaaaatcctccaccactgatacccacagtaattagcactattattttcataggaaagactgtatcaggcagccactgctttttcagcaaatttcaaaataaacgtccacacccatattgggaacgcaaaatcagttaatgcttccgataaaaaagaggaactagttgtgtgtctcagaagttctcaacacatcctttaaggttccaaacatctactagaaaaggagtgcagatttaaactgagtgaggtgtggagtgggggaagctgactgtgtctggaacaaagaactttgaggaacttgcccagagccctgcactcatcagacctgcagcagacattgcaggcctgaagaaaggtaggtccagggacttgccttcctaggctctcggactgatagtttgtttcatttcctgggtttaggatttctgggagtggagtgagaaaaaaaaatgaggtcacttcccatgacccaagctggtagtcagggttggggtggattgagtgcacatttaaatatgcatttggtgagggttgtgggtggttgaggaacagtcttcgctacagttgatgggagttagaaaagcctcctaaaggctgacactggaggctggatgaagttgttttagttacttttgttccgtaagttctcaggataccaaaacactgtaagcaacattttaaactttgattaattacctcatctactgttaatgcacttcttccatggtctttattctttgtctctgactggttatttttataattcaagacttaagaaaagatctagcacgtgcagaatttggtgtacatggagtagggcacaggcagggtccccagccttgtacatttagatgggctgtggcctgacgtagttctccagtggtctttggcactattcatgtggcacccaggcagtaaactgaggctgctcatgataaaatctgcaaatgaaaaacatcttgtagacttttagcattcttaggataagaaagaagcttgtaagtagtcgtagtcattgtaatctttccccagatgaagtaaatgaaatccagaaaagggaaataatgtacctagaatcacacaagttaacaaaagggctaggagcaaaaaacccagaattcttggttcctagcccaggcctttcccccttttcccttcccatgccaccatttctgcatccccatcatcctcctaaaaaccatccagattcaggcctcattttgggtttctagtctatttgataactctgccaagaaaaaggggatgaccgtgtataccactctcctcatgctctcttgtgttgtgacccataagggggatggtgacataaaaatgaggaaacaagagactgctggtgctgctgatccacaaggagactggggccaatagaagagggaagggtggtctaggttaccccacctctttatccggggtggggaggaggggcggggaagacattgtagttgtcaagaacctgatgcatataggtgatgtggcaaaaccaaggtttagattcttctccaacctgaaagaaatgtccctccctcatatgtatccaatattctctgcagttaaaaaatatatattttgattgtagagaagtggagtcttgtaaacacacgctttctttccttggggaccttatctaccctagataattaacacatggatttctgtggtgtaaagataggaggcagttatataaatttatgtcaagaatgtcttataaagacagagcaccagccttgaatgaccagaacctgacctatgttaccaaagaattatggaaaatcataagagtcaattataagccttaatttgatataatggctcggccctcaggaagcttacagccttacccgagaggcactaaacacagagggagaactaccaagtgtgtttgataagacagacccaacatgtcctaaattctcagtctgaaggtgtgcgtgagagattgaggccgagtttcccttacattaaagaataggccgggtgcggtggctcacgcctgtaattccagcactttgggaggcccaggtgggtggatcacgaggtcagaggatcgagaccatcctggctaacacggtgaaatcccttctctactaaaaatacaaaaaaattagccaggcgtggtggcaggcgccggtagccccagctactctggaggctgaggcaggagaatggcgtgaacccgggaggcggagcttgcagtgagccgagattgcaccactgcacgccagcctgggcaacagagcgagactccgcctcaaaataaataaataagtaaataaataaataaataaataaaaagtacacatttagatggactaagaagaattatcttcagtttctttcaaaataactttggtttctgtggtgtaaaaggaaaataacatagatttcttaaatccttagttaccactagaggttgagtaatccacatgcgggaaatgggggctgtaggagaatggtgtctgagagaagacagaaactatgcaaaactgttagtgtgtgagaagattagatgctgtggtgggtttgttgctattcttgtaaggtggtcatggccgggggagtggaacattcctgcaaacgggctcaacatatgcaaatgtctcaatataggaatgaaattactttagaacaacttaaataagtccaatatacttggggctttaaaaaataaaaaggagaaattcaaggtaaggctacgataatagatatgggttgaagtagcagcaatatcaacaacattaaatttttatctttatactaaaggtggtgaaatgcaaagaaaggactttaaaggggagggtgacacagttgtctttgcatttgatcatttggctacaaagtcaggggtgggttgaacatccaaggctacaaatggacaccggggaacattcagaggctgtaagcaatactcctgataaaaataggatgatggcttggcacgcggagatgggagaaatacagagttaaaaaatggttgcgtagaattagaatatgattgatggagcatagaaggtatgtaacggaaggtatcaatgacaaactaccagacatttaacacagacaactgagctaattgttgggccttctaccaagaaaggacatttgcagtcgcatagccctcttagcattcctgttacctttagctcttgcctctcttgattagggactgcttgtagtgttctgaagtaatctccacataatattccttgtgccaccttcctttatctgaaagataaattttgaggaagactgaatatcttctaatttggtcttctaatgtttgaaataaaaattacctcttctctttgctggaacaatttgataaatgatcaaattatgggctttattatagtgacttcaaaattaaccccagagggggacaattctctcaagttcagcaaaatttgagggtatggattcagtttaagaccaaaaataaggcctgctattttattttattcgtttgctccaaatctaaattttgtattctgttcaggggatgctgaagtctacttataggtttgattatacctactcaataaaatgtaaatgtaagtcacctcataaactccattatcattagaacagagattacaagaggaagaggagggcctcttggcccacctctacatagtcttgtatctacctagtccatgagagcaaaaacaagcacaaccctgactcttctgaccaatctttgagacaaactgcaaaagagaggaagagtcaacctctgacaacacggtaccatgaataacatgctctcaccagttatatagacccctcctttctgctttttcacttcccccaagacaggacaggttggagcagggtcatgccaggaataaagcccctctttagcatgtccttgagtggtaggaagtgttagaggaaatttatgttttatacttcaagccagaaatgagtaagtgatagtaggaagaccaataataatagtcaataggtagttagtatttattaagtgacatgaactggttgaaatgtttacgtgtgctatttcatcattaaatttctctacgagatatgctgtattattcacagggtagagttacagaaacacaagattaattaacttgagtaaggagtggcagggccaaaatttaaatccgggtaatttaattccagaactcgtttgcttaagaggatccactacactagtctggcgaatagaagaactcttttatttgcacatttattcattcctcagttgttggacatttgggttgtttgcaccttttgactattataggtaatactgctaggaaaattcattttacaagtttttgtgtggacatatgtttttatttctctttgtatgtatctgggaatggaagggataggtcgtaaggctggttcatggttgacattttgcaaagaatcagttagggaggaatcctccttatgttttaggaatagtttcagtaggattagctctttggtatttattagctcttctgtggtataaacacttctttgtacatgtgttagaatttggatgtgaatctatagggctcagtaatctaatcttccaccttaataaactggaaaaagaagaacaaactaaatggaaacaacttgtagaaaagaaataataaagactagagtgaaaataatagagagtagaaacacattagagtaaatcaacaaaacccaaagttcattcttgcaacgatcaacaaatttgaaaaacctttagctatattgaatgacaaaaattacaagaagaaatcactaaaatcaggaatgaaagaggcagcataattaccaaacttacagaattaaagaaattataagggatactataaaattatatccaaataaatcagataacatatgaaatggtcaaatttttatgaagatactactaaaactgactgaagaagaaatacaaaaataagaagaaatacaaaatctgaatagatctgtaataagagattaaatgaggaattttaaaaacttttataaaggaaagcccaggctcctgtgatttcactggtgaattttactaaacattttaaaaagaattaatacccttccatcaaaaactagaagagaagggaacaattccaaacttattacataaggctagtattattttgacaccaaaatcaagaaaagacaacataagcgaacaaaactacatatgaatgtctctcatgaatacagacacaaatgctaaaaaaaaattagcaagcagaattcggcaacatgtaaaaaagattatatatgaggacaaagtcagattaatctcaagaatataaaatttagcattcaaaaaatcagtgttacataatgcattaatagaataaaagacaaaaaccgcaaaaagccaccacgaatgcctcaatagattaaaaaattaacaaaatccaatactttttatgataaaaatactcatccaatgacgaatagaatggaatcactcccccaccaaataaaaagctattagaattaatgaatgagttaagcaagctcgaaggatacaaataatatacacaaatgaacagacacttcaaaataagatgtacatgcggccaacagtcatatgaaaaaatactcaacatcactgctcattagagaaatacaagtgaaaaccataatgaaatgcccccttacaccaatcagaatgactattaacaaaaagtcaaaaaaataaaaataacagatactaacgaggttatggagaaaaagaaatattaatacactgttggtgtgagtgtaaattagtttaaccactgtggaacactgtggtgattcctcaaaaacctaaaaacagaaataccattcaacccatcaatcccaccgtgggtatatacccaaaggaatagaaatcattctattttaaagacacatgcacacatatgttcattgctgcactattcacagtagcaaagacatggaatcaacttaaatgtccatcaatagtaggctggataaagaaaatgtggtatatatacaccatgaaatgctatgcagccataaaaaaagaacaagatcatgttcattgcaggaacatggatagagctggaggccattatccttagtaaactaacacaggaacagaaaaccaaatactgcatgttctcacttataagtggagctagatgatgagaacacatgggcacataaaggggaacaacacacactggggcttattagagggtggaggctgggaaaagggagaggagcagaaaaaataaattataggtactaggcttaaaacatgggtgatatggttgggcgcagtggctcatgcctataatcccagaactttggaaggctgaggtggatggatcacctgaggtcaggagttcaggaccagcctggccaacatggtgaaacccatctctactaaaaatacaaaaattagccgggcgtggtggtgcatgcctgtagtcccaggtattcgggaggctgaggcaggagaattgcttgaaccctggaggcggaggttgtagtgagctgagatcacaccactgcactccagcctgggtgacagagcaagactcggtttcaaaatttaaaaaaaaaaaaaacctggatgataaaataatctgtaaatcaaaccctatgacacaatacctgtatgaccaacctgcacatgtacccctgaagttaaaataaaagttaaattaaatatatatacatacaaaaataaattggagttctatatgctagcactgaataatttaaaaatgaaattaagacaacaatctcctttacaatagtttcaaatagaacaaaatttatcaaaataagcacaagacttgtacatcgaatactacaaaatgttaaaagaaattaaagaaaatttaaacaaatgaaaaaaaactcatattcaggaactggaaggcttaatattggtaagatggtaatattattcaaattgacctacagattcaacacaatctttataaaaaattcaagcaaccttatttcagaaatttgcaagctaattccaaaatcatatggaaatacaagggactcagaatagtccaaacaattttgaaagagaaaaatagtttggtgcacttacactttccaattcaaaacttactacgaagctataattttaagacagtgtggtattggcataaggacagacatatagaacaatggaatagaattgaataaaattgtctaaaaataaaaatgggatggaatagaatcatctagaaataaacctctatatttatgactagttgatttttgacaaggataacacaactactaagtgagaaaagaatagtctgtttagcaaatcatgtttgaacaacttcagattcacatgcaaaagaatgaagttggacactttcttacaccaaacaaaacagctcaaagtggagcaaaaaccaaaatgtaagacctaaatgtaactaatacccttctatttaggtatattgagacctatatgtagactttagcatcctgtgagcagaacacaaattttagatatagagcaaagagataaaataaaatagcaggccttatttttggtcttaaatttaatacataccttccaattttgttaaacttgggagaattgtcctcctctgggcttaaagtcattacaaaaaagcccatagtttgatcatttaccaacttgtcccggaagggagacaatttatttcaaacatttgaatacctaaatagaagatatccagtcttcctcaaaatttctctttcaaaaaagtaaggtggtgcaagggacagtatgtggagattatttcacaaccctacaagtagtcgctaatcaagagtggcaagatctaaagggaacaggaaccctaagaaggctatgaaactgcaagtgtcctttccctgttgaaagcccaacaattaattactttgtccgtgttaaaaatctggaggtttaagatcagtcactgtggctcacacctataatccaagcactatgggaggctgaggtaagaagattgcttgaccctgtgaatttgagaacagcctgggcaacatggcaaaactctgtctctacaaaaagcacaaaaattagctgggtgtgctggtgtgcacctgtaatcccagctactttggaggctgaggtcaaggctgcagtgagtcatgataacgccactgcactccagcttgtgtgatagagtgagaccctgtctcaaaaacttctggtagtttgtcattaatgccttctgttacctacactgtatgctcaattgctcattaaatgatgaccttctttgcctcttttgacagtttttgattagaagtttattttatctgacctaagtacaggcagtccttctcctttgactactatttgcatggagtatttcatcccttcactttcagcctgtgttttttcttaaagctaaagtgagactcttatagcatatagatctgtttttttttttaaattcagccactctgtgattgaagaatttaattcctttatatttaaggttattattaataggtaagtagttagtagtgccattttgttatttgggtgggggggggttgtttttgtagatatttgtttatttcttcatctcttgtctccctttgtggttaggtacttttatgaagtactaagcttttaattttttttatctttcatgtatctgctgcagttctacagttcttatagttctagaggctgggaagtctaagggcatgtatgacataaacctctggtgagggtgatcccatggaaaaagatggaagtgagtgcacaaagcaaagagagagagatggggccaaatttattctttatcaggagtccactcctgccatagcttaccctctcccatgataatgacatttatccattcacgaggatgaaggtctctgggtgtaattacctctgaaaggtcacacctcttaaaactgttacaatggcaattaagttttcacatgagttttagaggggacagtgaaatcatagcatttcatccacgaccctccaaaactcatgttcttctcacatacaaaatacaataattctgtttcaatagcctcaaaagtttttacccattctagcatcaagtctaaagttctaagtccagagtcatcagaagcagatatggatgagattcaaggtatgacttatctggaggcaaatgtttccagctgtgagcctgtgaaatcaaaaccagtgatttgtttccaaaatataatggtgagataggtatagagtagactgtctcagttcaaaagagagagccaggcaagaaaaaggcataactggtttcaagtgagtccaaaatccaacagagaaaacagaattatgttttaaatctggagaataatttcctttgactccatgtcctgaatcctgggagtgctgattggggccctcagacatgaccctgctcccatatctttgctggactcagtccgtgcttcagctctgttaggttggagttgcatgctagtggccttatagttctgagatctcaaaggtagccccactcccaaggctccactaggcatatccctaattgggactctctgtgttggctctgactccgcattcccactcagctttgccctaatagaggctcttagaagtggctccactcccatagctatatgtgatattctttgatcctaggtggagaaagccatgcccctacatctcttgcagtctgtgagcctgtacacatggattccaccaaggtttacagcttgtgccttccaggcacaggtattccaggcatagtggcagtgcgagctgaggtcctaggctcagggtcttgcaaaactgctgtggcatatggcacaggttcactcacccagttgtggctggatgcaggttacccacaaagctaaggctgtaactctaaagcacacctcagtaactcaagcccatggagcagggatggaattgagactgattctggggtcagtgcacaacatcatcaaggctccagggaaagaggggtgctttggaggcttgagctctggggagcaggttactgttgaaattttggttccagagacaatcgggcatagcagcaattccaaccctgggggatggagtgccacatagtgttaactctagaccctgggatggtagggcatggcaatatcccaggctgtgtaaggctggatgtagcagcagcaaggcctcaggaatgactaggcctgtctgtagctttttccttgggtttcttggagcaggtgcagaaatgaccccctggggagtcagggtttctcagaagcttggactccaggggacaggtcagttccggggaggtggggcactgcagctattttgcctggatggtggggtgacgtagctcaatcaaagctatgggtgcccagagagtggagcacagtttcaacttgagtttggaggggcagggtgcaccagcgactaagatgggggcatggagcagttccatgggagcctggcctcagggagtagagagtagatagcagcagtttggctcaggtatggcttccgcgtgtgcatagtgtagtggtggttaagtctcagagatggaggggtgcaatggctactcactcctgaagcagaatgcactctagccagtgattcagttccaagaaggggcagcacagtagcaactcaggccatgggggccagggcacagtgtcagctcctcctctgggatagaacagacatgtggacttcaggtagctctgtcagctgagctcagagcctgtgaagactctatgtgtctccagtagtaagactgcaggtgtctatggtggtgatgggagctgctgggatcctgtcactaaccttttccctgtaggaagaaggccctcctgactcagagctggttctaactgggggaaggggtgatggaagaaaggtgttttctctccttcttcctgcagccattctgggtttctgtgctctacaagatttctgctactcctttgctgttttctggagctcttccttagttattttggttggaatgtagttgtttattcatttttggtgtgtgtgtgtgtgtgtgtgtgtgtgtgtgtgtgtgtgtgtgtgtgtgtgttgatggcgatgaggttagtaacttctaattggccatcttgctgacattctctagaattctgaagacatattatagaccttttaattctaaacttctaatcttttaaactttcttctattgtgaccattttcttgtttttctgtagaattcttggtgatttcttcaatttttttccagttgactaattctattttcagctattccttgttatttaacacattggcaaaattttttctgtcaacattattttatatttgaaatttgtttgagacaatgttgcaaacatattgtgtcactttttgcactttaacttttcatttttgtgatttcattttcaattgaataaattatccatactttttacatattctatatgtgatatatatccagatgctcctaatctgtgggacttcttggaggcttgtatcaagcatatctacttccttctttatggaatccaatgtaagacttattcagagactaattgctttctaagcatgtctttttgttgggatttctcctttactactaactttgatagttctcagaactataattctccagggaagtgataggtatcagctgatgcatttaatttctaggattatgatcaataatttatgctgtacacctcaaggagactcttatctttgataagtataatctgaaatctgtggccatagtgtcctgtttctttgatactgtttctacattttcccccaaatttatccttatgcaatctttgtttttaacactcatttcacctgacttatagagattttagttgtttcccactttcataacaaaatggagttctaattctgtttgtccaaattgtttttggaacttttctagatgagataagaataagaacattgactttttggttacattcttacatttaagtccttatcttaactacttcaatcacatttacattatttatttcttattattaattatatttatctttcttttaaaaatacttaacttcttattttataatttgtaattttgtactttttattttactgcttttcataattttgaatgtatacattactaaaattaatgctctaaatgattaatcttttattttcattttaacttttcccctctagctttctctgaaattcaccctccttctcccaactttaatcaattttattgctagatagctaataatgtattttcattgatctatcagagataaatacacgatgacaattatttccacagaaatctgaattttttctgtacatagcaaatttggactacaataactttttttttcatttatgttaccaataaaagggcacacatctccaaacctgacagtttttagcatatatgctccactgaaatcaactatgacttgaaggatattagcaagcttcacttccctaaaattttatggaagtgggccatgaaacatctgaatatcaattcaaatacataggtaaaaatttccatgtggctttagcctatctccacattacttggttggaatcattatactgaggagagacagaggcataaaagtaatatctttgtgcttggaatttcaaaaaatggctttatgtattcttgctatgcaccagcaagttagaatttaaagcactgtaataggaaaagagatttaaatttgtggtgccaagaatatgactcagagctgtaagtttcattcccagagttcagagcttatgggacaaaatacaaggttacatgggaagattttcagccctgagaatttagctgtgctttggttataaaaggaggaactatacaatactgtacaataaattggaaggcagatgaatttgtgtagcttattactattataaaagtaatccttcatggggaagtggctgtaatcaagagactaggcattaaaagggatagaaataaaatctgagcagacttgggatttgaagttgaagaaatttctctaatttacctcacttctgtcaacatgtcctctctcctagcatattattgatatcatataacatttaagtctctctctctctctctccaccccccacttaatgtgttgcctcttccacttccctagctctaacaactattataatattggaggggaatgtagaccaggttttgtccttagggaggaatctgccccaaagtgtcaagactttcttttgtcatttccaggacctcatcctaaattacatttcttattgtagcaccttttctgctgccatgacaaccatgcaaggaatggaacagaccactccagggcctggccctgatgtgccccagctgggaaacatagatgtcatacattcatatctgtgtaaaggattgcaagagaagttcttcaagaggaaacccaaagtccttggggtaagtcaattgcaaatctgggagaagaccaatagtgttgtaaactcacgtttgatcagagctaatgcccaatacactgtcccgctagcctcataatacatcaaccagccctagtaacatcagaatttaatttcaggccctttctttgaaaaaatatataatattctatcacatcctgcttccaaattaattatatttaaaatatattgacttcagatctattctagggttgtgggtcagccatgataattatatttaacttcaatatagaagaacggcaaaagaaaaggcccacctgtccactagctgactccccctccacaggccttcctgacagctgatagatgtatattgctactctttctttcttgcagcttttcttagcctactgctcagaggatgaaaaatctgctattgtctgagcatttccttctggagtctcaggcgaacgtgtctaaaaacaatatagaattaaaacagtgacaggttagggaaggtgaaagaacattaaatataggtttatcactagcccaagcttcaaaccactgagaaaatgtcactgtggattctttggattccttctctttttttgcattattcatttttttggagagaaatatagttacttctcataaaatatgttatttatgttggcacatactaggttcaatttttaaatgtatggataattattttaaaatatactgtatgttttagagcagttttaggcttaaagaacaattgagagcaaagtacaggtatatcccatatgccccttgccccgacacatgcatagcttttcaattatcaacttcccccaccagagtgggacatttgttccagttgatgaacctatgttgacacatcattactcaaagtacacaaatcacaatggggttcattctctgtgttgtgtgttctatgggctttaacaaaggcatagtgatatgaatctacctttatagtatcatacagtatcccaccaatccctggcaatcactaatcttctatcgtcttcatagtttgccttttccagaaagtcatacagttaacattataaattaggtagtttttaaagactgccttccttcacctaataacatgcatttaaatttcctctatgttttcttatggcttaatagctcatttatttttagtactgaataatatttcattgtctagaggtaccacagtttatttatgcattcacctacagaaggacatcttgatggcttccaaactttggcaattaggagtaacgttgctataaatatctgtgtgcaggttttgtgtggacataagttttcaactcattcgggtaagtatgattactatattgtattgtaagagtatgtttagttttgtaagaaactgccaaactgtcttccctgttactttgcaattttgaagatttcagtcaacaatgaaggagagttcctgctgttctacataattgctagcatttgatttcctcaatgttctggattttttaccattctaataggtgtgtagtccaatctcattaccattttaattttcatttccctggtgacataagatgtggggcatctttttatatgtttatttaccatctccatatcttctttcttgaggtgtcttattaaagtttttgacacatttttttaattgggatgttagtattcttaatgttgagtttgaatttcgttgtatattttgaataacaatcctttgtcaggtatgttttttgcaaataccttctgtcagtctgtggtttatcttttcttctgacagtgtcttctgcagagcagaattttttaattttaataaaattaagatgattaattcggtatttcatgggttgtgcctttggtattgtattgacaaactcatcaccaaaaccaaggtcatctagattttggcctatgtcatctgttaagagtttcagagttttgagttcaacatttgggtctgtgatttattttgagttaatttttgtgaaggatacaaggtatgtgtctaagttcaatttttgcctatggaggtccagttttttaagtagtattttttttttggaaagactattcttctaattgtattatcttagttctttatcaaagatcacttgactatacttctgtgtctatttctaggctttctattctattcccttgatctatttgtctatttctttgccaatatcacacagtcctgattactatcactttatagtttgtcctaaagatgggtagtgttactcctaaaactccttcttcttcaagattgtttttgttattctaagtcttttgcctttccctataaactttagagtcagtttatcaatatacacaaataatttgctaatatatatatatatattttgagatggagtctggcgctgtcacccaggctggagtgcagtggcccaatctcagctcactgcaagctctgcctcccgggttcacaccattctcctgcctcagcctctggagtagctgggactacaggcgcctgccactatgcctggctaactttttgtatttttagtagagatggggtttcaccatgttagccaggatggtctcaatctcctgacctcgtgatccgcccgcttcggcctcccaaagtgctgggattacaggggtgagccaccacgcccggccatttgctaatattttgagggagattgcattaaatctacagattaaattgggaagaactgatgtcttgacaatgttgagtcttcctatccatggacatggaatatctctccatttatttagttattcgacttattttttttaagtttctcttatagattttgtacatagtttgttagatttatgcctaacaaacaccaaataccaatacctaaatatttaatttttagggttgctaatttaaatagtattgcatttttaatttcaaatttcacttatttactataagtacataagaaagtaattgactcttgtgtattaagcttgtatcctacaaccttaatataatcatttgttaattccaggagtttttggttgattctttcagatattctacacagacaatcacgtcatctgtgaataaaagcagttttatttttttccttaccaattgtatacctttatttccttttcttgtcttaccatttcagctatgacttccagtaaatggtaaaaggagtagtgacaggcttatccctgccttgttcctgatcttagtgagaaagctttgaatttctccattaagtatgaatttagctgtagttttattaataaatattctttatcaacctaaacaagttatcctctattaatagtttttcaaaagtttttataataaacaggcattggattttgctcaatatttttcctgcatctgttgatataatcatgtgatttttcttccttttagcctgttgatgtcattagttacattcattgatttttgaatgtctagtcagccttgcatatctgggataaatcccatatggttatggtatataattcttttgatacactattagatttagtttgcacatgttttgttgggaatttttgcatctttgttcaccagagatgttggtctgcagttttcttttcttgtaatgtttttgacttttttttttggtagataatagtgctagctccatagaatgagttagggagtatttcctctttttctgttttctgtaaagaattggtataatttcattttcaagtgtttggtagaattccaaacctttccaggcctggtgctttctgttttgaaaattaattaattatttattttatttatttaataattataggcttattcagagtgcctatttcttcttgtgtgaattttgacaaattgtctttaaggagcaattcattggctcaaggttatcaaattgtgggcacagaattgttcgtagagttattttattatccttttaattactatgggaactgtagtgatattccccctttcacttatgagtaatctgtgtcctctctctctttctcttagactggctaaaggcttattgattttatttatgtatttttcttttttttaaaaaaaagcattggatttcattgagtttgtctattaattttctgtttttaattttatgatttctgctctaatttctattacttttttttcttccgcttacttggagtttaatttgcttttctttttccagtttcttaaggtagactctcaggtgattgattttgatcattattttctaatatattcattcaatgttataaattttttctaagcactgctttcactacatcccataaattttgataagttgttttaattttttgacccatttataatgccatgagataattgtactccagctcctattttaagaacgctgtttactcatgttcatgtcctcaggcccagacgtcaagaaaatatcagatttgctcttctttttttcttcccttgtatacactcctttttcttcaggttacttccccttgctacaataattgctttctaattccttggccacttttctctgagtgtgtgacaaaagagagaaacagttgcggtagaagtagcatcctaggtatcagaaaagcacctctgggctggttctggcatactccttttaaccgtgaaatgattgacagtggtagagatgctgagagataatattggtaagataatattcatggttctttatgtgaaaaaaagagtgacaacagaatatcaaggtcatatgactatatcaaatgaaaaagaataaggatagcttagtgattggaaagggagtggcataagcaccatttttgtggtggataatcagtttttgctttcatcatttctaggttgtgcggattctgattgccttgatgagccttagcatgggaataataatgatgtgtgttgcatttagttcttatgaagaacatcccatttttgtgtatgttgcgtacacaatttgggggtcagtgatggtaagcagggtattttttgatataattggatataacataatagaggtgtaaataccctgatctttgcaattttattctaattctatcttgtaattctgtaaatttgagaatggtatctaacctttttaaactcaattttctcatatttaaaatagtaataataatataaaacttaaagctaggcgattaaatactttatataagtcagttaggatatattacagcaacacattgccaaagacccaaactggaatgacttaagcaatgaaagcactgattgtttcacaacaagattaggggcttatcatttccagaattgtttaatttggtggtgtaaggatttcatcaaggactgctagcagactataccagaggggagatggtagacacatctcatttttgataaatattttatatacatatgcccaaatcaactatcagtaagggtaatggacttgccattactggcttagactgattaagatttacctctgtagctgggaggagtctacactaccttttagctcaggaaaaactgaagaaaatgatggtttagttagcaaggaaaaagagatgtggctggtaaacagacagtttctaatatagagtctactgactatcaaatctcaggaaattgttaccttagaaaattaaattgttatttgatacattttgtttcataagtttaataacagtgactatgattaatattaaattaaaattagaattggaatttaagtttaaaaaccttttcccaagagaaaacacaagagagttttgatgcaaattgaaagtaaaattgagaataaaataccaagtcttacctattgacaaaagaaaaataaaatttatgaggcgggtttatgttagaatcaaggaatctattctagcattatagggtttccatttatttccaaaactgagaatgagacagtttagagttttataatagagcttaatttttgctccccttcactcgtgtacagcggaagtgaaagatttgaaggagagtgtattagtcagggttctctagagggacataactaataggatagatgtgtatatatataaaaggaagtttattagggagtattgagtcacacaatcacaaggagaggtcccacaataggccatctgtaagctgaggggcaatgaagccagtttgagtcccaaagctgaagaacttgaaatctgatgtttgagggtaggaaacatgcagcacgagagaaagatgtaggccagagactaaaccagtctagtgtttctatgttcttctgcctacttttattctggccacactggcagctgagtagattgtgctctcccagattgagggtgggtctgcctttcccagtccactgactcaaatgttaatctcccttggcaaccccttcatagtcacatccaggaatgatattttgcatccttcaatccaatcaagttaacattcaatattaaccatcaagagtccaccccttgtcaacctgaacccacacacatctcctgaagtcatacatgattttcaaataaagaaaataaagacaaaaggccaaaattatgcctaacataatgcagctattttttgtacaacccaaaatgcaccaatcccctatacaaatgctattacctaaagttaacaacacttaaatgctaatatgaagttaataagtcttatgtcacatggtaaagaaaaaagaaagaaaataaaatgaagatattttcttagtacaaatgtatacatgcacaaacatgttcttaacaaaagaaggaggaaatactcatgacaattacggtcttcatttctgcaactgatcacatggttgtagctggtattgatgacagccttattctaccaccgattctgtattccctttgccttcaggaagcacctcagcaggttgtgtttttttttttcctggtggagtgaccaaaaccttcattccagaaggcctagtctgggccatttgtagtcctgcccagattgggttgttgtagtttcccattgaccttaatcatagggcatggtaatactaagagacaccctaagggatctcctgtattccacacatacttccttacctccattgtggagtagtagactaattttatcttgatagtccaggtcagtcaccctagccaacactgtaactcccttcttagctggttgacttagaggtaagaggagcccaaaatggccaggtggcaatcttaacttccagcttaatgaaatcattgttgtctcccggtggcaacgttccttcctctggaactaagacctctaggccagcagaacatagtgttgtggaaacaggaagcaaaaattttgctggtaggtcactaggggtgatggtaagtggtgccacttccacttataccccttgatttctggacccacaaatcttggctatagcagaaacagtaccttatattagacgctgattcagagcatgcacagccttctggagaacattgccccagccctgaaaagtattgtcacctggttgatgttgtaattgtgacttcaaaaggacattccaccattctatcaatccagctgcttcaggatgatgggaaacatggtaagaccagtgaattccatgagaatgagcccactgccgcatttctttagccaacaagtgagtgccttggtcagaggcaatgctatgtgggataccatgacagtggttaaggcattccatgagttcttggattgtagtcttgccagaagcattgtgtgcaggataggcaaacccatatccaaagtaagtgtctattctggtgaggaaaaaccgctgccctttccgtgatggaagaggtctaatataatcaacttgccaccaagtagctggctgatcattccgaggaatggtgctatattgagggctcagtgctggtctttgctgctggcaaattaggtgctcagcagtggccatagccaggtcagtgaatggaagtccatgttgctgagcccatgcatatcctccatccctgccaccatggccacttcgttcatggactcattgggcaatgacaggggtggctggagaaagaggctgactggtgtccatagaatgagtcatcctgtttacttgattattaaaatcctcctctgctgaggtcaccgtttgataagcactcacatgaaatacaaatatcttcacagtttttgaccactcggagaggtccattcacatacctcttcccaaaatttatttgtcaccaattttcctatcatgcttcttccaagtccctgactactcagccaaaccattggctatagcccatgaatcagtatataattgcagatctggccatttctccttccaagcaaagtgcacaatgaggtgcagtgctcaacattctgcccactgggacgattttccttcaccgctgtccttcagggatgtcctaggaaggggctgtagtgctgcagctgaccactttgaggtggtgcctgcatatcgtgcagagccatctgtaaacagggcccttgtcttctcttcctgttaattgatcctggggaactccctatgagaccatcagtgcaggctgggggagagaaggcagtgtggcgggaatggggatcatgagcatttgagccacttcctcatataacttacttgtgccctcaggagttgctcaagcctgatcacatatatgccacttccatttgatgatggaatgctgctgtgcatgccccactttatggctagacaagtcagaaagcactcaattcatgataggtagttcaggtcgcatggtgacttgatgacccatagccaaccgtttagtttctaccaaagtccagtaacagggcaagagctctttctaaaaaggaaagtagttatctgcagaagatggcagggccttcctccaaaatcctagaggcctctgctgtgattcatctatgggggacttccaaaggctcctaacagcatccctctctgctgctgacacctcaagcacaattagatctgctctgttctatggcccaagtgacagagcaacttgcatagcagtttggacctgttgcagagccttctcctgtcctggaccccactcaaaactggaagcctttcaggtctcttgattaatgggccaagtaacacccccaggtaacgaatgtgtggcctccaaaacccaaataagcccactaggcattgtgagtctttcttggttgtagggggtgggggcaaatacagcaacttatccttcaccttagaaggaacatcttgacaggccccacaccactgaacccctagaaattttactgaggtagaaggtccctgaattttagtcatatttatttcccatcctctggcatgcaaatgtcttaccaataagtccagtgtgcttgctacttcttgctcactggatcccatcagtataatggcatcaatataatggaccagtgtgatattttgtggaagggaaaagtgatcaagatctccctgaacaaggtcatgacacaaagccagaggagagttgatatacccctgaggtaggacagtaaaggtacattgctggtcttgccagctgaaggtaaattgcttctggtgggccttatagacaggaatggagaaaaaggcatttaccaaatcaatggctgcttaccaggtaccagaagatgggttaatttgctcaagcaatgaaaccacatctggtacagcaactgcaactggagtcactacttggttaagctcatgataatccactgtcattctccaagatccatctgtcttctgcactggccaaatgggagagttgaatggggatgtggtgggaatcatcacccttgcatcttttaagtccttgatggtggcactaatgtctgcaatcccttcagggatgggatattgttgttgatttactgcttttctaggtagaggcagctctaatggcttccatttggccttttccaccatagtagccttcactctatgagtcaggggccagtgtgggggtcctgacagctgctaagcatgtctgtgtcaattatgcattctggcactggggaaatgaatgcaggatgagtgtggggacccactggagccactgtaagttgaacctgagctaaagctccattaattacatgacctccataagcccctactataactggaggatcacaatgactttttgggtcccctggaatcaatgtcagctcagagtcagtgtccagtagttcccaaaaggtctgatcattttttctttctttccccaatccagttacctggtaaaaggccagaggtctccttgaggaaggatgggagaaagattaacaacataaattgtcagtagtatagtgggatccttctttaagaggacctggcctccttttcattcaaggggttctgggtctgtaaaatggcatatgtctggaaattgatagtggggctgcgattctctgtttttataattcaaattagtgttttgtccactcgacctggaagttttctgcttatgtaaattaagtaagaattcggtaagcttcctgtcaatttcacttctaggaacgctgtaattaattagccaataccagagctctacacaagtcagactattctgattgctgctttgcctcttctgtctattatggtagctatgcctacctttcctttgatggctgagtgctgccatttggcccctgctgtctctagatccaattatttttattgcatttaaattttgtagttgagtgactacagtttctactgtaagatctgacatacagagaaaggcaatcacagagctcttcaaggatgcaagtgctgccctctcaaatctatttcacaaagtactggtcaagggtatatcttctgaaccctcccagctgggatgaataggcttaaagtgactaatccactccttcatcacaatctgcctaagcctttggatcccttcctctacattaaaccaaggagatcaggcattttcagctcacccacagtgggccatcttttaatccatatttcagctaaccaagcaaataaactagaacttttttaactctgcaagctgcaacattaaatgcagaatccctgcttagagggcccaaatcaataaattcagcctgatccaactctatgttcttccaccattatcccacacccttaatattcattcccatgcctgttttccagatttctgcttatataaattagaaaactcaagcagttcttttcaagtgtagcacactttcttgtgtatcgcattctgaacctcacctctaggggcctgctgggactttagttataggtctagaagcaaacaggggccttgggagtgggtcctaaggagaatcaacattgtcttgcttggcaacacctgaggagaaggccatcactatcggggaacctgccccgatagtcacgtaggttcttttctgttttccctaagcgttggctggcttgagaaataaagggacagagtacacaaaagagagaaattttaaagctgggcatccagggaagacatcacatgtcgataggttccgtgacaccccacaagctgcaaaaaccagtaagtttttattagggagtttcaaaaagggagggagtatgcgaataggtgtgggtcacagacatcaagtactgtacaaggtaatagaatatcacaaggcaagtggaggcagggcgagatcacaggaccacagtaccggggtgaaattaaaattgctaatgaagtttgaggcaccatggtcattgataacatcttatcaggagacagggttttgagagcaactggtctgaccaaaaatttattaggcgggaatttcctcttcctaataagcctgggagcgctatgggagactggggtctatttcacccctacagcctcgaccataagagaccggcacatctggggggccatttataggcctatacccccaggcgcgtattctctttcccagggatgttccttgctgagaaaaagaattcagcaatctttctcccatttgcttttgaaagaagagaaatatggctctgttctgcccggctcaccggtggtcagaatttaaggttctctctcttattccctgaataattgctgttatcctgttcttttttcaaggtgcccagatttcatattgtttaaacacacatgctgtacaatttgtgcagttaatgcaattattacagggtcctgaggcgacttacatcttcctcagctgacaggattaagagatgaaagtaaagacgggcataggaaatcacaagggtattgattgaggaagtgataagtgtccatgaaatctttacaatttatgtttagagattgcagtaaaggcaggcataagaaattataaaagtattaatttggggaactcataaatgtccatgaaatcttcacaatccacattcttctgccatggcttcagccggtccctccgtttggggtccctgacttcccacaacacatcactgttgcattaggcagcgcagggtttatctccttagacaaaggtgaaaaggctgatggcagtgtgggttagggaggggatgttgccactactggtgatggggaagctgttttttctggcaaaaaaaaggctcctgagagtttacaagctcagtgtccccagcttcatcaaggttctaccgcacatccccattccaagttgcagggtcccattctttttcaatcaatgctctcgctttaacagtagacacctggtgagtctatgcatgcaccttttgttgcaggtcagcaaatcgcatgataaaagcttgtgtctgagtgtccacaatttcagctctttctctacagaagataagactctcactcagggcaatcttagaagatttgaggctcagtatctgcttctgaagcttagagttagaatccctgagttcataattttctttcatcactttgtccagtgaacttaggagcaaaaccaaaaaaagaactccatccttaatattctgtttttctagatcatctcctggtaccaaaatctgtattagtcagggttctctagaggaatagaactaataggatagtcagggttctctagagggatagaactaataggatagatgtatacataaagggcagtttattaagaccagaagactaaatgagtctagtctttccatgtttttctgcctccttttattctggctatgctggcagctgattgactgaggatgggtctccctttcctagtccaccaactcaaatgttaatctcctttgtcaacaccctcacagacacacccaggaacaatactttgcatccttcaattcaatcaagttgacactcaatattaaccataacagacagcaaacactgttccatctctggaaagttgcaatatatatatatacatatgatatataacctatatatataatatatatattaccaatgtcaataatagctttttattaaactcttactatgatctggacattctgctaagtgctttttatgtgtactttttatttcacatcatcaccacaaacttttgagggaggatttctcattatcttcattttatggatgaagagaggttaagtaacttgctcaagatcacaactgtttggtacaggatcagggttcaaatagggtcactctattatcagaatcacatacatgtaactacctaggtttccgctttcatgtccattttcttttcaagatcacattgaaaaccagcttacatggttttagccttccacacgtgttcagtagattaccaagaactgcaggagctgtgtttgtccactgagtcatcactcagactcttgtaggcattgaactagattggtaaatgcagtaaattggtaaaacccttttttgctgctaccttccattattctttcaacctttttttccgaacatcacctgcaaagtgcctctcttttctcccttttacagtataagtaccagtaccaagagccagctgtaagtttgtattatccttggcctcttcagttctattcctatttatgtttcacattctttgttaagtttttcctctgagataccatatacatattttttcctgtggtaaatgaaatcccttttttcaatcctatcttcaaatacacaaacatacatacacacttctaatatgtttatctaatttctgtatataacatttttccaaggtgctttactgaattttttaaagagtttatggtactttttagtttatattcttggatgtttgcaatatatgttattcatacttaaataacagtagttttagccatttgtttcaactatttttcttatataattattttggttaatataccccaaatagtaatacataatagtctacatgtttatcttgattttgactttaataagatggtcctactttttttttaatcattaaacatgataaagacttgtagactgagacagatgtcctatcttgttacagaaagtataattatttatattttaccaataatgtttaagtcactaataatgttggattgtattaaatgtcctatcctatcaacactgtaaacatgagtagcaattaacaggtaacgtttttcttaaatttatttattatatatattagaatatttcaatattaaaaatctttgtagagttgaaggaacatcccaaatgttcatgatgtattttatgttacatgatggatgatttgctctactgttattttttttccaatggtgatttagataacatgaatcatctctatgtctgggtatttggaaactaaagaagtttattgagctattttattagtccagtttctttatattaggatataatttttgaatcatctgagatcaaatttgtaaaggaaataaaaaactctaataatggaatattataaggtagagagtccaaccaacttgattagctattttggctaaatgaaaaataattgccccattgatggattcagatgaagtagtatattctagttatcaaataactgggaactaaattttatgtgctactattttattttataactttttaaacatattttcaatgagaattattttagtacattttttgtttattgtattcaatattaataccatataagaattacttcttatcaggaatttggaagctttatctttcagtgtcctcaaacagttttaatatcattccagttagctattatttgaaaggcttgataaattatccggtggactcatctggcagaatttttctgttctttctgggaaaagagaaaattatgtgcaatctcttgctttctaagataattgacctgtttatacatatctatctaatttggaataaagtttactaagttgtgatttccaatacttgtttaaaactttttatctccatttttttctctcattcttattttattatttcagtatccttatcagttgcagcaggaattagaacaacaaaaggtctggtgagtaatgttttgtggggggtatcaaaaggaaaggattaatcaataatgtattctgccagggtataaaacaggttttgtttgtttgtttttaaaaaagtcaggagcaactatgcattttacttagcaggatctgtctcaaaaattacgataaggctaatgatagaattactgacataataatggatattttgtcaaggtagttgatgagggaatctttatgaagatatggaaaattatttagaacaaatatgaagtgggatcactcaaaaaagctctgcagcttgggattcagcccatgacagtcacaccaagtattggtgtggcataatgtttattgaccaattgattaaaaggtagattctggccgggcgcggtggctcatgcctgtaatcctaagactttgggaggcctaggtgagtgggtcatttgaagtcaggagtttgcaaccagcctggccaacatggtgaaaccccttctctactaaaaatacaaaaaaattaccaggcgtggtgacgggcgcctgtaatcccagctactcaggaggctgaggcaggagaattgcttgaaccctggaggcggaggttgcagtgagctgagattgtgccactgcacttcagcctggtgacagagcaagactccatctccaaaagggaaaaaaaaaagtagattccaactgtatccaaaaaggattttgaattttcaatataagaaattcacaataaaattattacataagaagcagcaaatttaaaatgtaactctcatgtcaagatgcctttcataaagccaataaaatgcaaaagccaagatctcaacaagggtttttctggctaaacactatttgagttttctttgttcaaaagataaatatcaaactctggagcatgatcaatatcggttttccaaatctggcctaacccaacttcctagtgtctgccgggacctgcagccacactacactcttcacactttcctgtgtaattttaatacttataaaaagcctccttaccttacccatgagaagagaaagtacaaaaaggaatacacaaccgagaaaaataatttaaaatgtagagaggcatgagaggcaagcagtgtttagaacaatgataagagatcgggcaccagaagcaaggaatggcagggaaggacacagacatgactgtccagctaatgtgtaaaaaatcattgaaaaccctgataaatgatttggagattatctcatcttctcacaggaattatctgaagaatttaagctggagaataatgggatcatatttgtgttttggcgagagatcagagttgaaaccactataaggagacaagttagaagactattgaaataagataaaggtagacagcagtgtaaagtaattaacagagatatatctgaggatgatgttggattgcttaattaattttcatttctttctaggttggaggtagtctaggaaagaatatcaccagttcagtcttggctatatcagggatcttaatcaatgcaataagcttgacgttttattcattccgttaccattactgtaaccacgatcagttgtcaagtaattgttacatgactatgtccattttaatggtgagtgttttctcttttcatgagatattatcatagaagcagtttaggggagtgctggctctggcaacaacaataattatcatttcctaattgctgaatgactttggaagttgtaagtgattgagaaatagaataatctttcatttaggagtcaggtacacatctcatctctgtctttatttttcctctatatgtgatgaggcaaaatgggaagaaagcttatagttatagaacacctactccttaatagttactgggctgggcattttgcataaatttttctgtttaattttaaaacattgatgcagtgtctactgttatctcctccagacccctctaaaaaatggcgtcaaaaagtcagtcccagccggacacggtggctcacgcctgtaatcccagcactttgggaggccgaggcaggcggatcatgaggtcaggagatcgagaccatcctggctaacatggtgaaaccccatctctactaaaaatacaaaaaattagccaggcatggtggtgggcacctgtagttccagctactcgggaggctgaggcaggagaatggcgtgaacccaggaggtggagcttgcagtgagccgagatagtgccactgcagtctggcctgggcgaaagagtgagactctgtctcaaaaaaaaaaaaaaaaagatgtcagtgcctattctcaaataataaagtaaaattgtcttgaacagtattttataagtggtaactcagtatcctttcccacatctttggatgttcttgcaacgttaaccacttttatcctcaacatgtggcacctgaaaaattctcaatctccattctgaattttactactttttttgtaccagttgtccttatttcaatgctatctcaattgctttattctgaaaattaccacttacacaacattttgtaagtaataaaagttcttgatgttttgggccattgggtaagtgtgggggaagagttcttgcagcacatcacagcagactaaaatgcacaatttaatctttataattattattattattattgttggagatggagtttcactcttgttgcccaggctggagtgcagtgcagttcacaatgcacgtggtggcacaatctctgctcattgcaaactccacctcctgggttcaagtgattctcctgcctcagcatcccaagtagctggaattacaggcatgtgccaccacgcctggctaatttttgtatttttagtggagacggggtttctccatgttggccagcctggtcttgaactcctgacctcaggtgatccacccacctcggcctcctaaactgctgggattacaggtgtgagccactgtgcccagccaaatctttattattaaaaagcctactggtcattttcaacaccaccaaactttcagttacttttcctctctatgaactttcagcctttcgccttgctgcttagttcttttcctcactgtgcccttccctcatgtgtatgtggaaactcaacactcttcctaacttactagacagaatcaactgcattctgtttacttcatttctagctaatcccacatagtcttgagggctacgtagtcacaccaaaataaccgcttgaggtgtctttgcgaaactaatttacttcccttgagatatctaatgctttttatagtaagtaattttatttcttgccactcactcaagataagaaaagaaagtttcttttgagaatttgacaaattttcccaatgtcactcagttagaaattggcaaaagcaagattcaattgtagaacttcttgtctctaatttccctcttatttgctattgctatcccgaagaagaaccttacttttagtttatgaggctctcttcattcatagactttaatggcacaatgatagagacaaaatctggaattggccaggttcatagggctgatttcgtgggcatgggacctgtgcagttactcaggacctcagagttagaagagccctgtgcttggtctaatgctctgctgttgctatcttgaaattatttttaaaaattttaaacaagacactctgtaaattacgtagctggttctgcattcatctcaatcacctttcccagaggtcatgatgaattcctattaactgtgtgaacatttttatgcctgttctaatagcagaggacttccataagagctttctggaatttgaagcaatgagtctcttcttgcctgggcacctttacattcagtccacaggtctatgagcccatagtgtatgccccatcacagggttggcaccccggtagacataagaaagagaacagttccctaccacaaaggaactttggttctcctggaagaaaaagatagaaatgctggaaagcatataattattaaagaggccagaaaaagttgagctctagaaaaaagtagttagagtctaccacccggaatcattaggcagaaccatatgaaattgccaatgatcaactatacttaacctagaaagacagcagtttcgtatagctcaagctaagatatatatgtaattttaataagagagtctataaattacatagctggtcctgcattcatttcagtcacctttcccagagtccatgatgaattcctgttaattgtgtaaacatttttatgcctgtttttatagcaggggacctccataagggcttcctgggatttgaagcaacgggtctattcttgcctgggcacctgcacaatcagtccacaggtctatatacatgctatgtttttggaagtccagccctgtatttgtttttgtaaataaagttttattgaaatgtaacgaacccatttatttacatattgtgtattgctgcttttgtgttataataacaggtttgaatgtgtgtgccagagaccttacggtctgcaaaacctaaaatgtacattatctggcctttacggaaagcttgccatcttctagtctacacttctagatggtaaaatccttgaagacaggggaattgtctgttttgtttgctgttctatattctgtgcctacaacaatgtttgaaacacagaggccgctatagctgttgaaggcacaagaaaataaaaaagcaatgaatgcaaatattctcaaggtctccttaagtctgcctcactcatatcctgagctcttggtctattggctcttccgcaacagagggactatccctaaccatggagagaaaaagagagaatatttaaaccagataatcgctgcatcagtccggggtaaaattaatagaaataagtgtactgcccaattgttctccaaattttgactatgtttcttggctgaagactagccctaaagccagtgctctggggagatggattaaagactgacctacttgatgttcattgttgtattagcttcttattgttactgtaacaaattactacaaatcattaggcagaaccatataaaatcatttagtgtctcaagacaatacagtttggttatcttctgtttctggaggtcagaagttcaaagtgggtctcactgggctaaaatcagtgtgggcaaggccgtactcctttctgaaggcttaggcaacaataagttttactgccttttctggcttctgtaggctgcctacctttcttggtttgtcatcccatcctctaccttcaaatcaagcaatgcagcatcttcaaaactctcttgaactctattctgcctcttgcttccacttataaggattctgtcattactttgaacccacctgaataatccaggaaaattctctcattccagctaataagcaaccttgatttcagctgcaaatttaatcctttttgttgtgcaaaaagaacaatggtccccccagggaggtctgcattcaaatccccagaagctgaggattaggggactaggatgcagacctccctgggggaccattactctgcttacaatcacgaagatatggaatcatagtattttctcaatgatatgagtttctagtactcaataggatatgatgacaattatctttatactaccttcctaacattttaaagcactttcatcttccatgcccacaatagcactgggaggtgctgaactagggaataaatgtctgtgattattttattagtgaaaaaagtgagaagctacttcagcagatcaagaattggtcaagggtatggctgccattgggaggcaggtttcctgactcccagccagtgctttttctcttatgacattgtggttgctgggaaatgttttcacttgtcatctccatttctcacattcccttgttatgagttttctcctagggtacggatggcatggtgctcctcttaagtgtgctggaattctgcattgctgtgtccctctctgcctttggatgtaaagtgctttgttgtagccccagtgaggtcagtattggccttcatttgaaggtatctgtattacttttgtattgctgtataatcagttaaacaaacttatagtcttaacacagtacacattcattatatttcagtttccatggatcaagagtctgggcccagtggatgtgggtccttggttcaggatcttatgactctgtcatcagggagttggccggggctgtggccttgtctaaagcttctgattctctttcatgtgaatgtggcggaattaatttcctttaagttgaggactcatgacaatgtactttttctttgagaccagcaggagagccagagtctctagtgctttaatcctctcataaagcattcacatgaagagatgaggtccatccagaataatgagtttttttataaactgaaagtcaacaaatcagtcctacatacgggacttgtatcccatcttatacacaggtttcatccacacttgagagaagggaatcacaaggggtcagtgagtgtcaccttagaactctgcctagcacaagagctaaataaaagctctttttccccttcctttctcaaagggcataacctctgaatccagataagaaaatatttcacaatgaagaggtccccaaaagtacttggttttattctattatcctattacaacaacttttcctggaatacggaaggaatgtcatgatctcagacttctctatcagtctgtgcccacctgcccactctcttaccctgagacctgcagcagatgctcctggcagttaagccaaaagaaagttacacagagagaggaaagtgaggaatggaaggagagaagaaatcaagaaagaggctctaagaataatggggtgggatatcctcctagaattgagggttccagaatgaggaaatggatagtaaaaccccaacagctactcattagcttcattacccaaagtctgaaaggcagacaaaaccgtcagccaaagaataaagtaattgtagtttgaggagattgtttctctggtgcccttctccatcattttgtgcctctctgtcttctttagggattcccaggcaataccatatcccactccccgacaaccctccctcatagaagagagattgactatagcgcattaactctagtggtggggttttgcattgtaaaaccctagaggtgagagattctcagcaattaccaatgattttgtaatttcatcaagtgaagtaactttcatgtcatgatatttaagtctgtgttccctttggctctttgcatagaagctggggaatgttgtttccctaatcccctggtttgagtccagaaaagcagtggctttggggcatatcttggctaaatctctatctcttcctggtcccccaccgtgccctaccaatcgaatgttgcactgagtttgtggaagaataaccagaacttttcttagttttgtgatgatacctgctattccaggccagtgtggtttttgcaatgctttatttgtaaccagcaaatcatgatttgggtatgttgatgtcatcagcatgaacaacctggtttggaagaagagccccatatttttcatgataccttggtttacccatcatattgtgcactgtcatccacatgtaagattgatcctcttgcgagaccagggcagtggtcatcagcagctcaggtcaagagctatcactgaatgttgtgtcctaaatctagcctgatctaaagaatgactgagaatccccacatgactgatattgagaatgaatcagagaagaaaagagtaaactctgataatgatgactttatgtgggcaggaaaggggcactctgaggtgatttgggtgactcacctatggcattctgattgtttgtgctaattacaccatcaaattctcacatggcagaaatagcatctcccacaccacttaagacagtttgatgccaccaaaagattaacagaagaatgctccagaaatctatgctgactgtaacacaagaacccacatgagaaagtaccagaatccaactccaatactgatagacatattgatatcattattatatggaatccaattatgacctctgtgtgtgtgtgtgtgtgtatatatatatatacatatatatatatatacatatatatatatgtgtgtgtgtgtatatattcaaaattttgttctcattttttcccctggaactcaacaactaatttcattggccctttatcgagagtactagaagttaaattaataaataatgcatttaatgaggcagcagcacttgaaaggttttcattcatcattaggactttatataaaggcattaaactggcaaataagatttggaagcagaagggcaaaaggtattgctaaaacgaggtctccatgcaaacacatacttctgctcccctgtataacattcctctcacttacttgactttttttctgccatatttggggaccaaagtgctttttccttcatgaagtggagattcatgcccttctcccccctccttttccttctgctttccttcacccatagaaagtaccttggaatagtatagtcagtccttgcatgtgcacaagctatcatttcagtaaaggtatacatggagtaaaaatcatatgaaggatcagattcaacttatattttctattttttcttcttcctctcccttcccccaccttctgctgggcagaattatatcttaatcaaatgtgtatcctgtgtcacatatggaaatgtgcaacatatggtatttgttaatgtttgttaattacatttgcttttttattgcagagcaaaaataaaattagaagcaatactttcatgtgctacctcctttctattcagatgcaatatgatggaaagagactaaatgttgatgtcgacagtactgtatggtggtaaataatgtggactttctaatcagacaaccctgggttttcatcttgctatcccatctttgttgtttactacctatgtagctatgaacatgccacaaaatttatctgtgcttcatatttctcttcagcaaaatagtaataatattgtctggcccatagacctatgataatttcttggtataataaagatagagcaattagtactctggtacatatggagcctcaaaagctttaattaatacatatacatatgtacatatatacatattatttatatttgtcagttcatcattttattcagcatatatttgtaaagtatctacaatggggcagacattgttttaagcatataagaaaatagcggtgaataagagagataatatccttcctcttgtaggttaaacttttatgggacaggacacagattaacataaaacaatcaaaacatttttatatgctgttagaagctaactgtaagaattaatgtgctggagagtggttgttggtagtggttgtgaaatatgagtcattagagagtaaccaggaaagttctttttgaggaagcgatattttcattatgataagataaaaagtattgaatttgcatggacattcatattttccaactcagtatataggatttctcattctgccctacactcacgtatctattgtatccacctttctccatgcacgcttttcatgggaatgtgaggccctccttctttcaatgctaacctgtctactttctccagctccggagatggacagtatctggaaaaagtctattatgacattctatcttcttggctgaggattgaaaggtaatctagcaagaaccaccaaatagaaccttaatactgttgcttactattatgtagtatatagaaccttaatactattgcatagatgttctatgtctcttatgggacatcagtgagaatacatgtagcctactttattactggcatacgtgtgtgtctgtaaaggaagtatgtttaaaagaaagtcaaataagcagaaatagcaataaatggaaatgaaatgaatgcttgatttcatggatgagcatctgtctgtcacagggttcatatagtagcatgatggctgctgattgcagcaaacttacctcttcacagcttcaagcccaacaggaaagaggaaagagagggagatcatttcttagacagtgaagtgaaaatgatgagagtaatttgattggaaatgtgtcagtcattcacacaattaatttttcctaggtcacaaagctaccacagaacttcactctagttgagttgatgtaatttgctcacagacgagcagaactgagaagcgccaagtgaaggatcagaccctagcaaaatcctttgcatctccaagtcaaagtttacctcaagttgggccaatccctgacgttttaaatatataaaggcaagggaagatgattaactgctataactgggcaaaatccttcaatggcttcctctctaactcataataaaagccagaactcatactaaatcctagaagtccttacatctcctgattctttgttctgtcttggattttgtaaaatatcctaacttatatcctgatatattgccttgagattattttaagtggcctgagaatgccttctgttggtttaaattagcgcatacataaactttttaaggttaacacttacataagcaacctaagattagtacatttttagttgtaaaaagctaatgcaaatattttaggcaattcatgcaaaatattatgatttcaacttgtagagaaggctgcctcatttatttcatatcatgcaattttaaatttattctttatttggttattctaggttctatctataagtgattaggatgtaaagcagtaggaaaacgtccatgaaaactttgccttcttttgctacatttacaagaaaaatagttattctttttatttatttatctaatttttgagacagggtctggctctgtcacccaggctggattgcaggggtatgatcttggctcaatgcaacctccacctccttggcttaagccatcctcgcacctcagcctcccaagtagctgggcttacaggcatacaccaccacacctggcttatttttgtattttttgtagagacaaggtttcgccatgttgctcaggatggtgttgaactcatgagctcaggcgatccacccactttggcctcccaaagtgctgggagtacaggtttgagccactgcacctggccaagataattattctttacatacatgattaaattccccacaacttactagctgtgggtagcttatcattgtgtttcttcagtttcctcatctataaaaattacaatagtacctaccttataggctcttacaaagactacaggtattattaaaacttgtaatcacagaatgaagattgacactggtaggcgatatgaaaagaatggtgagtgatactgataggtgacatataaagaattattaaacaatataaaagcaaataacaaagtaaaaataaaataataaaataagctaaagattaacataagtcttaatttgagcacataagcagttattatacttttaaatattcaggaaaagaaacagataagtgtgtccacagaattctgatttttaaataactgtactaagtataagagtaatgtccatatgggacacaaagaagctgcactaccctgaaaatcggtaattttcattaacttcagtgaagttttagaagtgggaatttataatattactgtttcaaatttaataccagaataatctaagattctctaaaaatggagtcatcttccctcaaacctattttccagtcattgtgagttaggtaaaatgagattccaactgtagtacagttttccactgtcaatagtaatacgcaattgggataaagtagtggatctttttctctaagagaggagtatttaacttctacagatgtcatattgagaatgacatggcagaacaggcacctggagtcaggtggaaaggatgatcctcctacaagtaatcagctgggcatgcatatgatataaatcaattttgtgtttaggaaaaactcagtgtgggtcacttagtggctttgatgtatatttggaaactaggactgttttcggtttgggtaatagctctcagttggctatctgagaggatttttaggacagaagaaacatagtagggaacaagaaaaagactataatctaagccaatgtagtgtaacacaggtgcatgcattcagataattttagaatgctactgaccagattgaatggcaagctcccatacattctatatacaaaaacatcagaaagttatttaaaaatgtgtactctgtcattaatcttcattgtaaacacattcatagcaccaaaggataggtttgttgtggaaatatagcaacaatttgccaacagcacacaccataaatcttcttcaaatcttcaagagataggtcctcacctacaccaattcctttcctttagatcatctcaacttgtattaataagacgtagaggcaatttgattctctgtctgcttagtgattgcaagtggctgctctgctgggttgaagttaggccaagaattgcctttgtattggctggtatgtacatgtctgagagcaagggctctggcaattagtgacagtggttaaccatcaatttgctctgtgaataataaggataaaaacaagtcataaggtcttgagtatataaggtgatattactgataacttctaactataagtagtccaacctattcaggtagagtcagtatacttgggactaaaaatgatttattttttaaaaaagtatttatcgagtgctcaatggtgcccaggctggagtgcagtggcgtgatctcggctccctacaacctccacctcccagccgcctgccttggcctcccaaagtgccgagagtgcagcctctgcccggccgccaccccgtctgggaagtgaggagcgtctctgcctggccgcctatcgtctgggacgtgaggagcccctctgcctggctgcccagtctggaaagtgaggagcgtctctgcccggctgccatcccatctaggaagtggggagcgcctcttcccggccaccatcccatctgggaggtgaggagtgtctccgcccggccgcccatcttctgagatgtggggagcgcctttgccccaccgccctgtctgggatgtgaggagcacctctgcccggccgcgaccccgtctgggaggtgaggagcgtctctgcccagccgccccatctgagaagggaggagaccctccgcctggcaaccgccccgtctgagaagtgaggagcccctccgcccggcagccaccccgtctgggaagtgaggagcgtctccgccaggcagccaccccgtccgggagggaggtgggggtcagcccccgccaggccagctgccccatccgggagggaggtggggggggtcagccccccgcccggccagccgccccgtccgggaggtgaggggcgcctctgcccagccgcccctactgggaagtgaggagcccctctacccggccagccgctccgtccgggagggaggtgggggggtcagaccccgcccggccagccgccccgtccgggagggaggtggggggttcagccccccacccggccagccaccacgtctgggagggaggtgggggggtcagccctctgcccggccagccgccccggccgggagggaggtggggggttcagccccccacccggccagccgccccgtccgggagggaggtggaggggtcagccccccgcccggccagccgccccgtccgggaggtgaggggtgcctctgcccagccgcccctactgggaagtgaggagcccctctgcccggccaccaccccatctgggaagtgtacccaatagctcattgagaacgggccatgaggacaatggcggttttgtggaatagaaaggggggaaaggtggggaaaagattgagaaatcggatggttgccttgtctgtgtggaaagaagtagacatgggagacttttcattttgttctgtactaagaaaaattcttctgccttgggatcctgttgatctgtgaccttacccccaaccctgtgctctctgaaacatgtgctgtgtccactcagggttaaatggattaagggcggtgcaaggtgtgctttgttaaacagatgcttgaaggcagcatgctcgttaagagtcatcaccactccctaatctcaagtacccagggacacaaacacctcggaaggccgcagggtcctctgcctaggaaaaccagagacctttgttcacttgtttatctgctgaccttccctccactattgtcctatgaccctgccaaatccccctctgtgagaaacacccaagaatggtcaataaaaaattaaataaataaataaataaataaataaaaagtatttatccagtattttttttccttagacttactgaagcaaaatgaagacttcccactaagctaaatttgtgtatcatatatttctgtcccctttatcctctaaaatctaatttctcttcactcatcctatatatcaaatagtataagaaacgtaatgatactaaaagattaaagaatattcagacgtgattttttcagtcaatgataaagaaatgggtaatcaataatgagcaatttgtaagtgtactataatagaattgctgcaaaaactgctgtctattgagaaaacatgcatccaactattaaaggtaatttatatttataaaatcaaattaaatccacttgtaaatgtaagagaagcctcaaagggcttcaatcattgttacaacagttataagaggtatttctatatttgaggttgtaaaataataatactgaatactatatgcaaagtcaggagcaaatcaacagttctaacagtctaacagtgatgtgtcattcttacattacacagtaaattggatcatagagcatgaaacagattcaggaagaatcatctcgggtgttcacaatgaccattaaaaatctgtagttgaacttagtttaaattaactgttttcaaaatttgccattttccacaactcttatttttcttgattctgagtcctgatcctgtaaacttgcaatactctgtggaaaggatttcaagagagatatacttttatctttaataagaacatgaattaaaccagaaaaaaaggaaatgagttgaaggccactgctgtggctactgaaataattgatgcattttatcttaatacttgactggaaatttcctgtttctttggtttgtatcttgttattaatttttatcattaaaatgtataatagctttatagtagcacatatctatgttatttttcttcattattaaaattgatttggccattctaagtctttatttcatgtaaattttagaattagcatgtcaacatatccaatcctaaaagaccttcctgaattttgattaggagggtattgaatttataggtctataagggaagaattgctagcttaacaatattaagtattctaatccattaacagaacatactttttaattgatttaggccttcattaatatgtctcagcaaggttttttcattttctgttaacatgaggaacgtcctttgacattcattgtattgatttttctggtactaaattttctcagatctttttgtctgttgtctgaatacatctttattttaccttaagttttgattaatattttcaaaggatgtggatcccatgttgacagcttttgccttcaagtactctaataatgtcttatgactgtcttctggcttacataatgtcttatgagaagtctgcaagtatccttatctttgtgataatgagtccttttccccctctgctgttaaaacattctctttcttactcatttttagcaacctaattaagttatgctttggtgtagtttgatttttcttcatccagcttgtggctagttaggctgtttggatctgtgggtttatacttttatcaaatttggaaattccaatgatttatacaaatatgttttaaattcatgctctcttcttggactcagattacatgttagactacttcatactgtcccactgatgctttattaatgtttccagacttttttcctactctttgcttcagattatagagattctatttccaccttccagttcactaacattttcttctggaaaacttaatgtgttgttactcataggcagtgatttattcatttcatatactgtagcttttatctctagaagttctatttgattttttatatttttatactctttgtgtccaagtatttcttgaaattcttatgcacatttataatgaatattctaaagcacttctcttttattgtaatctctataatttacaggtcttttttattaatttttctcctggctatttgttattgtgatttttctgtttcttgccatgtatagtaatttgggattagatgctggatattatgatttttatttgattgagtacccaaatttttcttttttcacaagatattccattttatttcttgcaggaaattaaacttaaagaccaatttgattcttttgagacttttacaaaggcatgatcgggagggtgtattagtcccttttcacattgctataaagaactacctgacactgggtagtttataaagaaaagaggtttaattgactcacagtttcacaggatctacaagaggcatggctggggaggcctcaggaaacttacaatcatggcagaaggtgaaggggaagccagcatgtcttatgcagtggaagcaggaggaggagagagtgaagggggaagtgctacacactttcaaacaaccagatctcatgagaactcactattatgtgaacagcaaaaggagagtccactcccatgatccgatcacctcccaccaggtccctcccccatcattagggattacaattcaacatgagacttgagtggggacacagagccaaacagtatgagaaggtttatcattgttattaattgggggtatgctttactaataatttgtttattattaacagattaattattaaagcattaataataattgacttattattaataacctttctggaggtctctattctatcccccaagtattcatggaagtctctgcattccagctgattggaacttgaatgtctcccagcattgtgtgagccctggtaatcatacagcttacaactacctggctagtccttgactgtacttttaaaatttcaacctataaaggtacagctttgtattggacaacaaatttaggatacttgcagatttctggaactctgtctctggagagctatcccctttattgttctcttctcattaattccagctgtttcagtgccctcaaattctggtttttgtcttatgaattcagcaatatcagaataaatctctctccctaccatggtatggaaagtttcttcatgcagaaaaccagagcaattattatattcactttgttttttcacttgtcaatgttgaaattcctgcactaactttgtccaatgtccggaaagagttgtgcttatttttttccagttttctttatgatttaaaaaattttattgagacaagatcatccaggttcaagtgcagtggtacagtcataggtcactgcagccttgaaatcctgggctcaaaggatcctcccacttcagcctcccaaagtgctgggattagaagcatgagccactgggcccaacccagttttttaactgtacagagtggaagattaagtctggttctatcataattggaagagctgagcttcaactttaaaaagatgctcatgaatgtaaatattagcatttttatttttctttatatttaaaatttacttaagcttgtcaacatatgtaacttaattaaatcaatacttctaatttaaaatatccaagcagaaaatttaagtattatcatttttatatgctgttatttttagtcaccttatttaagtttcatgaagtagctattaaaagaccctagcacattccagttattttatatttaagttaatttgtgatattttccaatgttttatatagtaatatccagacagttttaatatatgctcaaatgtcttttcttcacacaacaaaaaatacaagaaatataataagacaaagttgtacacattccagggaaaatatttaaatcttttaattaattaaaatatgtcccttggtttaaattttgagtttactgtatgaaaaacacaggaaagatgtataaagcaacatccttttgattgcctggtggatagaaaaacaaaaaacaactaaatttgagatacagtttgaacaaagctgacaatgcttttgccttcctctttgaatctcttcaagatcagcaatttatttttttactgactcaggtttcttgggattgctgctgctcatgtgattcccaggaacttaactacttgtgaataactctgtcaggctgataatactagattaagaaaacaattcatcttcaataagtacactctttctagcagaagaagcagttcagaaagttccttgtggtttcccttctgaatcttttcatcgtcaatttcagcaaagcgtggtattttcccccagtaaaaggtcaagatagcttgttttaatccttctcagactctaggtacagtttcaccagacacagtgggtaacttgctctcatctcttaaatggatgctttcagcttggccaggaggggctggacatcaagaggaggaaagtcgccgtctggatggggctcaggaatcacatagtgctgtattagctagctgtcatctatgttgattctttttcccttatgccagcagcaaagtgcttcaacccttgctgattacttccagtaatttattttttatcttaatttttttctacttagtattccctcatatttggaaaaagatgaaaatatttccaccttacctccagctctgaagccacagacactgtgcccctaacagggtcaccaaattgtctaaataacatacatgcatatatatatatatatatatatatatatatatatatacacacacacacacacacacacacacacacacacacacacacaggcacacatggaatatatatatgcatttttaagttacttgaaaatatatttaaatacataaataatttgtgtattacacacaaatatgttatttgaaaatacatttaattatataaataattgtatatttaaatacatttaaatatataaataattgtatatataaatatttgtatattacatataaaggtatgtttttaaaaacataatatatgcaaagggagagataagtgaaggagatagaggaatatactaatggagaaaggaaaaggagatgctgcttactagcttctagcttttgttttccagcaatccaaagaataatatctcactagagattttatatgtgcttcagaaagatgtatagaaagagaagagttcctagtgtatggggtacgagaggtatcatggaatggaagggataacatgataattaagagaagcacagatgtccttagggaatagaagattttctggtcctgaaggagaggagttggaaagtgggtaacgaaaactgagatgcagatgggacctgggaaacagggctagctaggaaacaaaagcacaaataattgttttgggtccaaagagttaaggcctccttattctctaaggagagatccttggaactagaaaggccagagagacagacttgctcatggacctgcaggaataagagatattttatggataatgtgcacagggagttgtacgtatacttagaggaactccaaaatttctctccaaccccttgttgtcaaacataagcatctgtttttgagctctgacacagaaacttgggataactagatgacctctcagcacaataggctctagcaataggaaattgacttgagtgtcatcagcaagacggtggaataggaagcctcaggccctcatttccccatggagagactgacttgacaacaatgtatgaactacaatgcctttgtgagaactctagaaactagttaagaggttgcagcaccttaggtgaatgcaaagccaggaaaagatgcatcaaaatgaggagaaattgttgtcgcattttactcattccagccactctttcaccctggcacaatgcgacttgatctacagaaaacattaaagttccagtggaacaggaattaaaagaaattaaaaactgtgtaagcaaaaactcagttttatgtaaaaaaaaacccccaatttcccttaaagaagagaaagggctggagtcctttaaaattaactgcctatttttctttctgaggctagtgagccttatctctgtctttcccaggcatggtgaagcattgtttttctagctgtgcagctgcaagatcactagacagataatctcaagtcataaaacatgttgtttcttgaaaaggaagaaatgatgtaatgcatgtcttaattaaataactgtctttgtttctcacttctgtaatatgcttcctcctgcacagatctccccccaccccacaaaatgcttaaaaggtaaccacattctttgttcagggctcattcctttggatgttaatctgactggcttggtgcacctaaaaaattaaataattcctccccaacctctctgtctctctgattacttaattatcccactgcaccagattctcctttaaagaggcaagaggactagaccatgagtccagcattctgggttttgtgggggttacccaaggtactggtttctgtcttgcctgactcagagtgcagagttgaatagcatgttgtgagcctcggagaacaaaggcaggcacactatttcaccactagggagattgtagtactgcaggcagacaccagggggagaaagaagaagaagcaggcaaaactcttttactaggaaattacacatacatgtcccaaagaagtttgaagggcccccagaatctctagctatgctaacccgtaaaggtcttccactacataaagtcagtttgtaatgactggaaaaggttggtgttgttttcaaatgcacaaatctcaataaaagatcacaaggcatacagagaagcaagaaaacatggcccaactaaaggaatacaataaatctccaaaaactaactttaaagaaataagtatctatgagttacatgatcttgtaaagatatttgtacacatatttattgcagcattattaataatagccaagaggtggaagcaacccaaatgtacattaatggatgaataaagaaaatgtggtatatacatacaatgaaacattaatcaaccttacagaagaaggaaatcctatcatatgctacaacaagaatgagacttggagatctcatgctaagtaaaagaagccatcacaaaaaaaaaaaagaagccatcagaaaaagacaaatactctgtgattcctctcatatgaggtatccaaagtagacacatagcaggacaagctgtagacagaacccctcagacaccaagttaaagaaggaagggctttatttggccgggagcttcagcaagactcacgtctccaaaaaccaagttcccagagtgagcaattcctgtcccttttaagggcttacaactttaagtgggtccatgtgagagggtcgtgatcaattgagcaagcaggggttatgtgactgggggctgcatgcaccagtaatcagaatggaacaggacagggatattcacagtgcttttccatacaatgtctgggatccatagataacataaccagttagctcaggggtcgatctttaaccaggcccagggtgtggtgctgggctgtctgcctgtggatttcatttccgccttttagtttttacttcttctttctttggaggcagaaatgggcataagacaatatgaggggtggtctcctcctttagtcccccgctttgagaatctcactcattagtgggagttctcactttcattttcactacccatgtcttcttgcaagacagatcaatagtgattcatatagtacatttgtgctgaagcattttggtgaactaaggtagcgatgaagctttttatcatttgaagaagtacaggtagcaaacaagagagcagtaagcaggtttctattactattattactcctattataagagttttaaatcctcctagcactgggaaccattttccaaacatggccccaggatcatatccatgccacacttgcacgggcacatgtgccagttttgtcatatttctaactatgtcttcaactacttgcccttggtcatctatgtgtagatagcaattagtaaggttaaatgtcctacagacccctccttcagctgccagcaagtagttgggagccaatctattttgatagatagcatttctcatctgagtttcttgctgggccagaatagtcaaggctctgctggtcttattagtgattatttctaagacagcttgtaaccatatgctttggttgagcatgtaaatgggggtccagtatccccatgagctgtcttttgcccaagtagcaggccaataatattgtatgattctttcaggggaccatttattatctttccaatttcttatggctatgtttctcttttcatgggaagcatagacagggaagcccaggagttcacctgtctttatgggcagtaggaagaaagatgatttaatagtgccaataacacaactactttcccactggtcaggtaatttggcataagttctatgcccacatatccagtataatccagtgggggctgtccagtcctggtggtactctgggtgggttcacatggtttacaactttgggaatttactaaatggatttttcttagtgtggtttgaacgccacggtggctgtttttgtagtactattatacagtttttgcccaaggcagctgggtcttcccacaggaagggtgaagtccttccccactcttgctatacagtattgtctaatgattgaggctttcaagacccagaagttatcagggtgattctcttgagccaggaatttatcaggaactgggtctgtaggtactaattctcaggcttcccatggccattgatctcccagtatagttcctccgcataaataacatgaagtgacattgagagactgggctacatgcttggctaattgcaaaaacaaatttcttgtttttcctggaatttctggcactggcacattcagttcatcatagaagtttgaaatactggctcaggagagggtttataaacttcttctcaaactatgatatttactcaaggatccagtccagccccatcgatttctagggttacatgctccccttttttccagggaggatcaagggggttggttattaccagttctaaggggttacacggacccctggtataggaagggccacttttccttttctgaaggtggacaggattttttttttcattttttatccaagtagcctaaatgacacaagaccagtatccacattcattttcacacagtcctaattcatgacaaatgtacttattttttgtcatatagcctcttttttaattaagagaaccatatcctatttctaacttattactattaatgacagcacaggcatcaaatttcaaggtgacttttttgggcacccctttttcttctgttttggctaacactttaatcatgtcatttatgagcccccacgagtcctcagtccttaatcttatttcaaaaactgtggtcatgggaagctcagatgggtcataacacacataacacaggtcatttcctgggttacataccttgtatagaataacattatacaaacaagttattttcagagttccagtacacttataataaccataaaataataggaccatagcaactttttgtcctacctcagtgacttggtgtatacactgggaacagtcctcagtctgaggaaggtcagttgaagtccttactgtacaagttcaaattttaaggaaaatgagtcccatgatgagttttcttatgctttggccatgtgtggaccagtcagcttctggatgtgactggagcagggcttgttgtcctcttcagagtcactttgcaggggttggtgaaactgctactgtccacatacagctcacagtctactgatgttcaaggatggtcttggaggttgggcctgctagaataaactagtccaatacctctacatatttatgttcagctgagctctctgataccgggaacaaggtggcagggtttagggtgttgcaaacttcaatggttatgggggattttcacatagcaagctttgatacttggttaatctagcatttgttagccaatgatgtcctttggtattcatcaaagttaccacagcatggaaggcctttatattcaggttttgcctaagcgttagtttatctgcttcttgtgctaacagggctgtcactgccagggccccttagacatgggggccagcctttggaaactttgtctagttgttttgagagataggccactgtccttggccagggcccgacagtctgggctaaaactccaactgccattttttctctttctgacacatagagtgtaaagggttttgtcaggtcaggtagccccagggctgaggccaacatgagtttttcttttaactcatgaaaagttcattgctgttggttgtaatagatgtagttcatctaatctacatatttatttacagttatctactaaaatgttgactttaatcttgcagctatttgatttcaagctttaaagtgatctggtattccccatgggaatccaattgcatctaaatagacgtgagagtcaaaagacccataaggggcttctctcgctttacaatgtcttatttttcctccctctggctgatgaaatgccagggtgaaagggatagccaattggactgaagtacaagtgccactccagttattcagcagagtgcccagtaaaggtccaccacaataccaccacacatctgctctgggatgaataagggctgactgattgataagctcttgaaaattcttaagttcactacatcccttcaggtttccaaggaacgctaagtttccttcctattgtgagagacacgaaatgaacttagtgttgggagatggcagctggatggccctcgggggctgaacttcagggtgccagactttgggatatagcagagagagcttggcatgacttattactccaggctgtagaatcctggaaaagagataccatgcagcccacggtccactggaggaccaccttagtggaaaggggactgtctgggcctctggcctgccacgtgcacaagcataacaattgcttttgtttaacgtgcaaatggaatatttgatccattttaaccaggcatttgcatcttggtatcttgtcttaactgccaaagtttgttttaagtctttaacttctatgatcctctagtaaaatgaatgtatgattttaggaaattacaaaaaccagttgggtcagtccatccttgctctttagtggtcaacagaacgttggaccaactatggcataaaagttctacattggggggcaagactcctggttgacactggagtctttaccaaagtttcccccaatcaaatagtcctaatttactaatgcccagtctgaggagagtcaggagggacagaggtacttttctgaagtagagagctgtctttgacttggcaagtccccacagggtataataaggcaagcattaaatgcaatagtttgaggcaaaattgacttggttatgttaataactagatggtcagcaatagagtgaggaaagaagaaagagtaatagaatagataaaagagttaaatttttctcagctttagtttggtagggttttcccctgggactatggcccacgactctggagcgggtggagctttcttgactggtgtgatgagtccatcctttttccactgtatgaacagcagtcttggtggttagcagcacagggtagggtccttcctaggctggctcgaatttcctctttttttttcactttttgatgagaatgtgatcttcagactggtgctggcttaccagaaattgtaggggtggcacatgtgttaaaagacttttagttttgagggaaaggaaagtgggagataaaccaagtatataatttttaagaaattgaccttttgttttaaatgtggggatgtcagcagtggactttatagtccttggtgcctttctactgagaaatttcctttagcacctattttttattagtttttagaccaaagaagccaaacagctttttatatttgacgcttcctgtatgatttttataccagataagctaaatgtcacccttatattagtgtgttattaatgttaaacttagttttaataaaacttagtaggcatatttatttaatttttaatgttagatcataaggtaagatttttatagactctttttaaccttttataatctttgttaaagagcaggttaatgctttaagagaaacccattgtgtttttattttaatgttcagttcacagaaaaactggatgatacccctttaactttagccaatatgtttacacacagaatttcctttacaattgacgttttaaaacttgcttaaaccttcaaaacaatttttaaaaatcttttaatgtaggtaaaaatccacattcttatgcctccttataatgcttttaccagaggtgtattttacttttcttatacaccttgcacataaactgttttctcagtagttttacattcaggaggcctagttacttttaaattatacaacatttcttgcatcaattctttttttataactctttttctttcatgacttttgtagacaattcttcaacatgcctcaactttctgacttattacaaacatttctttctttaaacaaccagttaatttatttcaggacaagaatttactatataagattctttttacataaattctgcccccgcttttttccccctttttttggggggataaccattcttttccaaagcaaacttcctttatgtctgtggattagactgtctaaggctacaagattagaagttactattatacatgttatactgttaacttttagcaaattttacttttgttgaaaaccttgtacgtttgggatttcaattatcctttgctattagtaagactttgtttagtccaaattaacttagaattggtatagacggctttttcttttccttccattacctgggaggaaccgtctatcatccagtcctgaagggagttcctcctaggtctggtcagacctttgtatggcaattaagatttagatcccctgttaggaaacctgctgggttaagggaatttttagtggttaatgttaaatcatctttttttttttcccttaggatacttctgaactggtgaggtgtgctcacaatgaggtttcctctaaaagttatttttctactttcttctgttagcaaagtagttgccgctacagagtgaatgcatttgtgccatccgcagattactaggttaaagatttttgataggaagtctacaggttgtcagtggcctcagtgctttcgggctacgcacttgtttacacttacagcaaggtggtattggagtgttgtagggtcacagagaagaccttcaattatcaattataggttttaaatttaccctgtcttttaaaggaatagggtacactgtttttttcttaactacttgtatatctctttctttctgtctttgactttctgtgtctttctctttgactttccttttgcctctgtatctttctctctctctctctctgcctctttctttctctctctctctccttgactccctctttgtctctctgtctcttcctctctctctctctgctggtctttccttgcctctgccagctgcttatgctgctgttctctcaaccactgtgagtgggtggggtctaaaaccagctgtacccaagtgtctatatacgggaactggtctgggtgccctggcttacaagttaccttgtgccacacctttgaaacaagggacctgtccaggcttccttctgatggccaacccacctccaatactggccagtctatttcacacaaagttctagtttttcctggtgtcatagtaacactgtaatctcccttaaatcctttcttgaaatttttcaacatagctcctagtggtcttactttgtgcctggcccatgcttcctgaagacaaaacaccatgctcacactgcaaaacaaaaatgggtaaaaagggcacacacacacttttgcagtttacaccaaaccagaatcaaaaccaaaatcagagtgtcaggaaatccaagccgggtcaaaaccaaaaccaaagtatcaagcaatccaagtcaagtcaaaatcaaaaaccaaagtgctggtacaggcacaccatgggtgatcaggccatgcttccacttaaatggagtgggcaagttccaaagaccagtcttaccaagttttagatgtccggactccaagtgccagttccttcatggtgttcagccactgcattgatcctccacaggggcctgctgtgcactgctctgatgaggcattccactggggcaattgcctacctgggagtgctctcaggatctgcttcactcaagctggctggagtccccctcaggtatgctccacagggcaggcctaagccacctaaggagctgtctcgaccatccattaatcaccttgtttcctggtcagggaaccaagaaatgtagcaggacaagccacagacaaaacccctcagacaccgagttaaagaaggaagggctttattcggccaggagctttggcaagactcacatctctaaaaaccaagctccccaagtgagcaattcctgtcccttttaagggcctacaactctaagggggtccccatgagagggtcttgatcaattgagcaagcagggggtatgtgactgggggctgcatgcaccagtaatcagaacagaacagaacaggaaagggattttcacagtgcttttccatacaatgtctggaatctatagataacataaccggttaggtcaggggtcaatctttaacgaggcccaaggtgcagcacagggctgtctgcctgtagatttcatttctgccttttagtttttacttcttctttctttgggggcagaaactgtgcataagacaatatgaggggtggtctcctcccttagagacagagcaaacatggaacagaaagtaggatggtggttactaggggctaggaataggaaggaaaggggtggttgttcaatgggtatagagtttcagttctgcaagatgaaaaagttctagaggtctgttacacaacaatgtgaacaaaattaatactagtggtctgtacactaaaaagtggttaaaataatgaattatatgtgttttgtaccacaatttaaaattttaaaaataaaagttgagaaattgatttaaagaaaatattgttctgtttctagcacacctgcctttacacagaacacacaaaaacccttttgctcctaggtcagtagctctcaacatgaatgtgaggggattttgttctccctccatcaggagacatttgacaatatcagatactgtttctggttgttacacatagggtgggattgtgctggcataggccagggagtctgctaagcatcctacagtgcacaggatagccacctactgtaaagaattacccagtccaaagtggcattagtagcttttttgagaaacctgtcccagatcattaatcagaacgtgttattgatataccagtcttctcccttgtagttaggttggtagaattcagactctggaaaaaactgggaatgtaaaaggctgaatgagtgtaagctgaaagacaagagaaaggagaattgttttaagcttactaaagccaaaatggaaaaaaaaagaggggggaggattggggggtgaggaagacagtcaacagaccgcttttaggccatcattccgaagggttctgtgctaggaaccttacacgtgttgtctcacataatccttaaaactcagaaatgattttaaattaaatagcacagagaggaaaactgactggagagggagcctttgcttaggtaggcaactttaactggtttattagcacattcccctgaagggaaagggggtgtgattgctcctgaagagaccaaagagactgggctcctttttaatcaaagctcaggaggagagctgcattccactgtttcacagatgctgtgagggtgacaaagatgcagggcacccactggaaacacagacggcactctgcgaaagaggaaggggcgccaggagcttgggtgagcaaggttggaggtgattctgcccctctccccaggctttctgtgtgagtccattcctcctctcagatttattgttagaacttaagacaagccaattacatttcataatgtctgtgtcattcagacgctgagaactaatccagccttctaaatggtgcttcttaactcctttcttcaacaggagagttaatgtgtggaattaagtgcagaatccatggccctctgtggtgacggtgatggttcaggttgtgtttctgggttcattctggaagctcccccaaggaaaggaggaaggaagcttgcagggtggggctttgccattgccctgactggctctggtttccttgcctgatacattgaagtcagcttccaaagaatgccacccaaggttttgaaggggcacagtgcctctgtcctcacaaaaccagcctgcatatgagtttactgaattcatttaggtcctgctgaatctttcccatttgttccttctctgtttcaatatttcaatgcttccctggaggggcccaacctttctggagggcaaagatctgttgttagagaaaaagagcagccagaggaggaagatgacttgagggtaggcagcagttgggcaatcagtattgaaaggttgctttcagcctgccaagacttggggaattagaaaagcaagataaaacaaaacaaacaaacaaactatatatataaaaaacaattttttaaaagtttttttatgttctatattactattagctatatattaatgaatgttcctttaaagcagtgtagtcattattgctattattattattatggttagttatagacagtggaatattgttctttctctatattatgattactagcactattactgttattagttacatgttattgaaagcttcaaagcagcataggctttttataaatatttttgctcatctttatgacaattctccagtgttggtattgctcctctatttaacagattagaaaactgaagcttcaagaacagacttgcctaacaacaggaaacttgtatgtctcgaagtggcaattcacacataaggctccatgactcctgaactctcacaaatattagttggctcttttactgaccttgctagaagtttacagncacggaagtgcaggaacatttcacaaatctacaatctgtgagtatcacatcctgtatagctgtaaacactggaataaggaagggctgatgactttcagaagatgaaggtaagtagaaaccgttgatgggactgagaaaccagagttaaaacctctttggagcttctgaggactcagctggaaccaacgggcacaggtaggtaatgctggaagacttttctcatctcactattcccttgccgtgacctcattagaggagtaatttaacttgaaactccttgacagcagttaagagacactagggccttttggaaatagagtgggcaaatggaaggagtatctgtttttaactctgtgtccgctgtattctaattgcataaactcagtgagtcacttacctaaggttgtgtaattaatgggagcagagctcttgtctcttcaaatgtgtttagaccatttgtaaactgggcggtctgtgctttgagaatggtgccgtgaaaagggatccaagctgagcttagcaacaaataccacaacctacttggtctttatgctaaaaagtggggaggaccaacgacgcgagcctatgtgttatgagtccaagacttgttctcataccactgcatgcagctgtttctccagcctgagtaaactcagacacaggctggcaatgccaggtgggaaattaggaagaggtagaatgatctagagatttatgcaaaggcttcagactccaggaaagctgagatccaagactggttttacagcttcccggctgtgtgaaccagggtgaacaataagggtaactgcaaatatttcttcagcattaactctgggccacacatatatgcaataggtatattatttgcattcataacttaaactttattttgcattttcttatttattacatgtttttactaacttactaacatgcagagctgttgtaaggattaaaagcactgcagggtaaaaattaagaatgtgtctggtaaaatatgataaacatatctgagtgctaataaatagtattattaaacaagaaataagtaagcagagttcatttattagtctgaaaattcatcaaatatatggcaatacagttgttgtcagtaggactagaggaaagggaggttgttgcatattgcaaattttgtgtgaccatttgcctctggacattgagacctctcaagattcatgttgctgccaccctgtgatgtgtttattatctataatggactgtgtcaaacattatggaaaaatcctcatgaaaccaagattgtgtggttttcactgttccatactatcagtttctttctctaatggacaggccaagcctagactaattggcaaagactgagttactgtttttggagtcagaacctgggagctctgtactttttaagagctaaatctattttttcttacatagttggcaacaccatcatgacatcacaacctgttcccaatgagaccatcatagtgctcccatcaaatgtcatcaacttctcccaagcagagaaacccgaacccaccaaccaggggcaggatagcctgaagaaacatctacacgcagaaattaaagttattggggtaaatctaattcagaacgtgttggagaggggttgggggaagtgccaagagatgatatatgtcttgggactggacatctgtcgtgagtgtggagaccctaaaattttgctagagggactttagggtagaagccacttggagaaaactgtcccagaacttttccacaagaggttgtcttaaaaatatattttcccttattctgaatatgaggaattgattttctattgttgtctttgtatttttacaatacagtgcttttctatattttcttttacaaaagtaatggtggtaaataatgacatattgtgtgtatgtgtatatattccacaactgcatgcttaataatccaaactgactttttgcaaataatttttccctcactgcaaattagaggaaatatacaactccttttcctcttttctcctaacgtttttgagaatggaaatgatattcaccttttgtttgtctgtttctcctctcacccagaatttattaaagaagctgtattgcatgaagggaggagagaaagaagggatctatcttggattgggagggaaacacagagttttggtttctagaattgcctctgcacttatgtgatctgaggtgaggcactctgtttgactggatttcaggacctggtgggactggtttccttgcctcatgtacaatcacatgggtttctatgaggctcatgtgacataaggtctagaaaactttttggtaaatgataatagagctgtgaatctctgaggtggatgtcaggaaggaaaactacctcctaagacagagcttcagttatacatgagaacatgcagtatttggtttctgtccctgtgttagtctgctaagggggatggcctctaaatgatgagaacacatggacacgtagaacagaacaatgcacactgaggcctttcagagggtggagggtgggaggagagagaggatcaggaaaaataactaatggatactaggcttaatacctgggtgatgaaataatctgtacagcaaacccccatgacacaagtttatctatgtaacagacatgcagttgtacccttgaacttaaaataaaagctaaaaataaaagagcttccagagcttcagctatagggttgtgaactgcagtttccgaggaagtgaccaaaggggcaaactccatgtccagtggagtctgggagatgaggggagggccttctgcactgccaatactgcagagaatgtgggggctttcagatgtcccctgttttcagagagatagaaagagagttaactagtcatggacttagaggtcctgagagctgggaaagtaaatctcagcacttgctgtgagctggaagcaagtctcatgagcagaccagggcctgagaggcagaaatgcagaagccttcctgagcacctgccagacacctgagactgtggcttctgtggcagagctgcacaccctccaggatgtcttttcatatttctcactccagagtttccacagggtttgtatcctcattaggatcttgcagaaggcgataatgcattagtgccatgggagcggcaaaaaggccctgtctttacaaatgctggttttcatcctcaatctcactttctcttcccacagactatccagatcttgtgtggcatgatggtattgagcttggggatcattttggcatctgcttccttctctccaaattttacccaagtgacttctacactgttgaactctgcttacccattcataggacccttttttgtgagtagagtttctgaggagggcaggatggggcaaagaggggaggaagatgccaatagcttagacttcccacctgccagcttgctatgtttgatctgccaggagcaaggagtcaacggtgaatcttgttctcctgtcgggtaggatgacaggggttgcttgattttagatcaatttcttatcagactcaaataaacatttcttttgaagatcatcttattcttcacattatcatcttgagctatgatgaagctagtgacttctctccaggtttaggcgaaaaaaaaatccatgaattaggataaagttgggaaggaacattttatacaaaaaaaaaaaagagcataaatggaagacatcacacactcacagagaaaccacactgttatcccccccatgcttgtggggatcatggaggaaggagaacttacacctctgagcattttgaaaatacttttactgcattgactgattcccaggtaaggctgagcagatatctatgcccagtgattgacaggaaattcctctgaaatagctgcaagtctggagtttcaaaaggacttagtagtcctttcctcagagaactgctttctctaagatgggggctttctcataggtaagtttccctttcatagatgttttttccttcaacttcctgcaattcagtagctatttgtttttcttacatttgtgtatttgatgcaccaagaagtccacctttttgtgtatcttgtccatttttcttgtcttattaactaaagttacacttggatttggatttcattggttttccccaaatgacctttttctgttccaagatccatgccaagctactacattacactacattacattttgtcatgatgtctcctcagggtcctctaggctgtctaagattttccttttccttgagaactttgatagttttgggtagcgctggctgagatttttatagaatgttcctaaatttgggtttgtctgatttttttttttgatgtttagagtatggtgatgaatttttgggtggtgatgatgaggtaaagcaccattttcatcaagtcgtatcaagggtcatgctaccaacataatgtcactgacacaattaaccttgattatgtggttggggtagtattttccagatttctcctctgtaaaattactacttttttttttaaccattgcttttatgtccttccctagagaacatcttacaccaaaactgtctcattttattaaaaaaacaaaaattatttcctggcttttaaggtctttttttgtttagtgggatattttttgtttattaggatatatttctgctatcttttttttttctgatgttatctgaatgttatatggacaaagggacaaatctatgtatttaaatggaacttacctcattgatcactggtttctcagggattttcccatgagagttgtctataaacattgtgatagtgacgtcgaaggtactctgtacatggaatctgacctgaccattttctcttttatcttagtttatcatctctggctctctatcaatcgccacagagaaaaggttaaccaagcttttggtgagtaagagagctataacccacaacccaatggatcaaaataaaacttagacagaactctttaaggctagtctttctactttgaaaagttgaaaactcagttccagagcagttggttgttgttagaattaggagctgggcctggatcctctgtatccttgttcagagaacatttctccaattattgtaccctacatcaaagtctgcattcaggggattataatattccctctgcccatgccgaagaatgtatcacagagaaattgtgcctgtttatgaggttctttcggtgataactggccttcaaattcaggttttcagtggcaaggaagctgacagtgttataaagcggtctattggttggggtccattctttaagcccaggtgttacaacccttgaaaaaaaaatgagtcaaagtgttgttcatgtgaggtatccaaagtagacacagaggctactacagtatactacattacatttaggcctgatgtctcctcaggttcctttagactttctcagattttccttttccttgaggacttcaatagttttgggtagtgctggctgactgtatcctttcatctatctcaccagaagtataatacttttattttgtttgagtataaattcttgcaccctaaaaagttgtccttagtcatttgtattggctaacaaaaaaacaaaacaacaacaacaaaaaacaaagctttacccgtctttatcccttattccagcaaaaactagagttggaagtggcagggagacaaagcctggattatagggagaatcttctcttgtctttaaagtttcattaagtcttcgctcaatccattatctctcaaggggttgatgttggagattatgtgagagaatgtcataccatgcaattgcaccgagactcaatttggaagctctggctacaaaaatctcccaaagccagcaaggaagtgagaaacggcatccagaaaaatgccaattctttttctcatcggtatttagagattattatttggaaccctcagttagactcggaactactaactagatctgtgctgtttaatttaactttctttgaggatggaaatgaaatgtaactttctatgatgatagaaatgaaatgtaactttctatgatgatggaaatgcactacagctgtactgtacaatatggcagtcacatgtggctatcgatgatgtgaaatatagtgcaactgaataaaaatttctcttaattttactttaaatatagatagtctatgtggctattggcaaccatactgagtagcctggcacaagggtagtgctttcaaacttttaggaggaaatatatgggcctgttactccagagaacaatcccacagtgaacatgcaggaagctcaaggatgcaggatgtggtctcggggtgggctcagacttaccagagacatcgaggctttagcgagttctactcttgtcacacattgcaccagccctttttgagattgaagaagagtgccatctcaagacaaatctagcttattctaagaaatatagactctaggcatcaagaatactactggctactaggaggcccaggagtgtacacttcagtcattatgttgggaaattggggtcccagagtatcaactggtgagttcctaaaagaagaagtgcccatgtgggattaagtaacattctactgtatggctgtgaggtgtgccctggagcctacctacctgtaactatagctctcagagtactcttagctcaattctcttttctgtgtgagttggagtacaaaagaagtcacttctgaggttagtttatctattcccttcacttcataaatgtataaatgagaaccagagtgggaaataaaatcaaggaactgattacccaagggaataaaccaaggcaagtctagtactgtgacttcaatattctgacctccagttcagacctttttcttgtacttcccgctgcctcccacacattacaccatccttgggcctgcacctagacctctgcccacagccaccccatactgcactcagtgtggccaatcatatgcctgcccatgttccagggcctgcctgagactcagaaccaccccctcactcatctttgagaggtgtgcttttgagagaagcaatgggcaggcgagagtgagctattaggttggtgcaaacataattgtggttttatggcaaaaaccacaattacttttgcaccatgctaatacatgatctatcttttccatgtggctgatgcttccgccaggggtttttgagttgagcgagagagaaactgcatctggtacgttgccaccttcactttgggtcacgctctcttggtaatgttgcaggtaaagcctcatgaaagccctgctatctgtcctggggaaagaatttaggagagtaacattctctaccacaccactgaggtcctgcttaaggtgaaccagttcgtatagtcattcattcagccaagaattaccctggagattgagagatttttgctggacactggagaggcatacagcaataaatgatcaatcccagacctcctgaggggacagataagggaataacttacaatttaatggcaaagatgcataacagattcatgagtcattagcaatgatccttacccaacatttctctttcaggtgcatagcagcctggttggaagcattctgagtgctctgtctgccctggtgggtttcattatcctgtctgtcaaacaggccaccttaaatcctgcctcactgcagtgtgagttggacaaaaataatataccaacaagaagttatgtttcttacttttatcatgattcactttataccacggactgctatacagccaaagccagtctggctgtaagtatttttagatgggatgttctaatcttatgaggtattcaaaagccttgatttcttgttattccttcttttgaaaatctctctattggttctggtttgggcatctgggggaaagccaggtttatgtaaatcaaaggggactacagggatgagattaaggggattacatactaatagagtggaattgaaaatgttaaataaggttgatgatgaaaaactaaaacttactgtttgtagaggttcttaattatcaaactaatccaattttggaggcataaattatgagtttatcaaaatgagaatcttggtacatggagtggtgaattaagaatggaaacagagcagaaagacccaggagatcagaataggccaacaaggaaacagtatgtgtgcatggtaaggagttaatttggtttgagaagacatcagattcagtactaagaaaaagaggataggaaatatgggatgagaagataagggcttcttcttctaatgatcacaataatgaataatactgatcaggtgagaatgcaacattattgttgctttttgttatagctgaaagaagtgtgatatattaaatcaggagataagaaatatagggagatggagagtgtaattgagaatgattgcaggagaattctatctctttggaagaagaaaaataatgaagtttggctaatagaaataatatgtctgaagttgaaagattaaggggcatgtgcatggtcagcaacacattgagagaaaaacaggcaacataagagtaaagggacggctgggtcagtggctcacccctataatacaagcattttgggaggccctggtgcatggatcacgaggtcaggtgttcaagatgagcctggccatgacggtgaaaccccatctctactaaaagtacaaaaactagctgggtgtggtggcgggcagccgtaatcccagctacttgggaggctgaggcggagaattacctgagcctgggaggtggcggaggttgcagtgagctgagatcacgccactgcactccagcctgggtgacagagcaagactccgtctcaaaaaaaaaaaaaaaggaataaagaaattgcagaatatttgttgtcctgcaatcataaaaacaagataagccaagaactcagctggaagatggacagatagaaaggtctggtcaaagtcatgtttgtatagcactcattataaagagggccttgctcccaaggtaatggtataatgagaaaaagtacaagtaaatgaggctgacagcaattggcacagattaatacctggcacagccaattccaccttgggaaaaattctgaagagaaatttcagagaaatttggtagtgataaagtataaattcatgatgggacgattttacattggaaataagagagattctgtcaagtttgcttgctggaacaatttccagtaatggaaaaagttatatcttctctttaactgtgtataaataccacaaaccaaagtttcatgtgatcaaattatttccgtttattatcagatggccagttctgcacaaagaatgtctcaggacagaaatgatagaattcattcttgtgagttggtgttggtgattagcaactctgacagtttactaccttcactgtttttttctaagccttacagttacacccccaaaaaaaagaaaaaaaagaaaaaacaacaaagaaacaacaacaaaaatcaagaagaaatacaaaggggttcagatacatagacagggatgtcaatactaaattttacaaaggacttgcacagtcaaaacctccttgatccttacaaatttctgagaaagaaatgttagtatgcatgtttgatacatgaggaaacaggagctagagaaagagagagacttgtccaggcttacacagctactaagcagtaaaggtgagactggaacggagctgctgattctcagtcctgggagttattacgccactctgctttcttaccgagtgaacaatgtcatcagaactatggatgtctcaaagaagtaagaaataagtgtatgaagtagattagttgatttaattactattcatctccctttctcctctcaaggaaatgagttaaggggttgaattaagacaattgtgaggtgtgggaggagcagttttatcttcctgatggtgtcctttcttcattctctaatggttgaggtggtcttcatctctatggtcacctctcaactaggcatgaaggcttcagctgacctaagcaacatcaatcttttatttcttgactttcagggaactctctctctgatgctgatttgcactctgctggaattctgcctagctgtgctcactgctgtgctgcggtggaaacaggcttactctgacttccctggggtgagtgtgctggccggcttcacttaaccttgcctagtgtatcttatccctgcactgtgttgagtatgtcaccaagagtggtagaaggaacaatcagtcagtcatgagatacacatgggagggcatttgcattgtgatggaagacagagaagaaaagcagatggcaattgagtagctgataagctgaaaattcactggatatgaaaatagttaatcatgagaaatcaactgagtcaatcttcctattttgtcagcgaagggaatgagactctgggaagttaaatgactggcctggcattatgctatgagtgtgtgcctttgctgaggacactagaacctggcttgcctcccttataagcagaaacaatttctgccacaaccactagtctctttaatagtattgacttggtaaagggcatttacacacgtaactggatccagtgaatgtcttatgctctgcatttgcccctggtgatcttaaaattcgtttgcctttttaaagctatattaaaaatgtattgttgaatcaaacccctatggacttatggctttatttaactgaattaaaaagccttgatttatccaaaattgtattatagagtgtagaatgaatactagggtgataaattgcaattatttgaagaacctggtgatatgctctacttatcttggattagctaagaattctatgtatacagttggaaaaatggcatatatacatctatcttgaacctgattgaagtctgaagacctaacatattttgtttcttctagagtgtacttttcctgcctcacagttacattggtaattctggcatgtcctcaaaaatgactcatgactgtggatatgaagaactattgacttcttaagaaaaaagggagaaatattaatcagaaagttgattcttatgataatatggaaaagttaaccattatagaaaagcaaagcttgagtttcctaaatgtaagcttttaaagtaatgaacattaaaaaaaaccattatttcactgtcatttaagatatgtgttcattggggatctcttgatttgcctgacattgacttcagcaaaagcacggggctgtaaattaccatttactagattagccaaatagtctgaatttccagaaaacaaggcagaatgatcattcccagaaacatttcccagaaaatgtttcccagaaaactagacagcatgatcattcaatggatcacagtgaagcaaaggacacaactttttattgtaccccttaattgtcaacaggagttaactgatttgttgtggtgctcagacttttttatacaggtgctagtgttttatcctatgtattttaactcattagtgcataaaggcaagccccatataatgaagtctcagggtatatgaaagtagctggcttcaaaataaaatttttgagtgcatattttgttttaacactcgttttgttgttttttcccttaaacacagaataagtcaacaatgacagacataaacccaaattggaactccattttctccccatcaaatattcaaacaaaactaatgagcaaacaaaagctaaccaggaatactcattttttatgaagcatcgaccagttcatacttattttcttattgcaagaaagaccaattgtttgtgtataaatattaagtttcagcatgtgtgtacacacacacacgtagaaaagtatttcaattttacatgagctccatttcattgaaagaactggtcatgtttcccttgcttttacccactgtagcaggggtcatacccactgtatcagatatcctgatactcagcttttctgctgttttcttttccaggctgaaactggactgtcagattctttgattttagctttatcttcaaactctcgttcattatgtcttctccctgtccattgcaccccccactgacacacaccatttcttttatttatttacctactgtggacattcaacttttattgacgcttattggataccagacactatgtcaaataagagaaacagagatgacagtgaaattagggatatatacagggcactaactattatttgaacacagaataaagcataccttcttctgcctaaaagaatgtaggggataaacaggtgtgtgtgtgtgtgtgtttgtgtgtgtgtatgtgtatgtgtgagagagagtccttcttttgaaaatccacatcccccatatcaatcacatggtgccaccttctgccacaggagaggacaatgactcagagtccacaattggtgtattcatctactgtactcacactccagctttgttcctcaccccctgccaccatgtcttcaccaccaccacagcactctggataccagaagtcttactgattacccagtcaaacttctggtcttcaaagttccccccgggtctctcttcagctttgacttgtttatcagagaaggcatccagccctttaggcaacactcaaagccactttttatcctaggctcaacctcactgccatgtcatccactgatatcttttctttcaagtagcaatgccccttcagcccaagtcaagtgagaatgatgcctaccttgagatagaagatgtattgagataacctttgtaaagcagttaccaatatagctgacacatgaaagatgctcagtgaactcgagttttattgtgtgtttacttccctttgctttcacttccatagtccaactttccttccccttccacttccaccctctatgtctaaaattaacttcaaccccaatacatcgctgggatttggaacctgattatactcatgaaatctttcatttcttcaagaaagtctgggccaggcacagtggctcttgcctgtaaccccagcactttgggcggttgaggcgggcagattgcttgagttcaggagtttgagacaagcctggagaccatgaccaaaccctatctctataaaaaaaaaaaaaaaaaattagccaggtgtggtgacacatgcctgtagtcccagctactcaagaggctgaggcaggaaaatcacctgaaactgagaggttgaggctcattgagccatgatcttgccactgcactctagcttggtggacagagcaagaccttgaaaaaacaaaaaaaaaggaaagagaggaaaaaaaagagagaaagaaagttgtagaatgctctaaataggatgactcagactgtgtaggaaacatgttttctcttccctttgcaggagaaagattttagaattattggcctttcccaatttctgcacagttgactctactgacaccttatggtgataacgaggaacaacttttctcccaagagaaatagaaaaaggcaaaacaaggtatctggaattcactggaggtatctaacttgaccacaggaaatcacacttgctacctttgtcctttacagtgtctccacatgtcatcagtgaggggaaactatgcatttttcaaaagttatttattattgtaaggaaagtggctgtgcttcagtcaggagtaggccaaggtaaacatccggtatggtatgacacagcgggtttggagcgcaggtgcacaaccccatgcattatgtaaccatttactataatctgtttgtgtgagctcatacctggctttgagccactctgtctgtgagtaatataactgcactgctgactctgtaggacaggagagagaataaagccacgttccaactgcctacaatccaagtgttctttcagctacccaccacgtgtccaccagctcccttcagaacccagctcaggttggaacctgtcaattggcatagtcagtaggatcccaagatgagtgagcccttggcctcaatgatcccaggtcagccatgtggccccagcatgtgttgtggtacctgatggtagctgtgctgctaggatgggccttggtggaaacatgggtggtggtggacaggtctcctgtgagcatggagaaggcactgaagtacctgtaagcacagagcaatgagaggacaatacctttgctggcatagttcaatgggcgtttttgactgtactacggtaagtgcacactcagtccctgcaggatgcagcaaaggtaggggacctccaggcacaaacagaaacccagaggcccagacacacagcttggaatgagaattagagtctgccattagtgtgggcttgggcccaccatcccagtcagagactcctgctcagtctgatactgaggaagaagaacatcagttgcgagtttgcccagtggtccatcagaaaatagagcaggaacagtcattggggccccagggttgggcttggggaccccctaccatgacagagcacatgtcttacagtgcctataccccaattatattgtgggaattagataaacagtgtcagcagtgcttgggggaacccctacctgcctcgatgcctcatctttgggatgagggagccaacagcatcgtctgctctgcctctgaaatggagaagttggcttccattatgactcatccctccctccgtcagtgattgcaggtgagcaggtggttagcacagggcaaggcgaccacaccctaattgaatggctgatggtggccatttgaacgatatggaaagatgccaaagaaataccagaaactgtgagtaaatggcagtcgtatctagatttagtgcatgtaatttgggagatgggtgtgtggcaggctgttccatctgactacccaagggccaaatgatgaacactttacctcccacatgagggactttgtgttgggctctgtgcccctgagtgcctttggttccctggccactgtcctcactctatgtggggtgctgcatacataaggtgactacttccatggcggccctcagggaagcagagggctgtaggtgagaccagagagtctgtgccataaaaaaggggaaagtttccctactccagggggctacctcttgggacaaaatgcatccccagtaggtgacctgcacacagatgtagattgatttgattttggctggggttgcgtgaaagaaaattgataagcaactccatgaagtactgttaactttgtggaggcaattgtccccagagcagcaattctggaaaatgcctaagagggagaaggatgatgcatcctgcagggactgagtgtcccacccagacactccagctcaaggactactagaagatgggtggaggtataaagccttttttttttttttcgagagagacggagtctcactctgtcacccaggctggagtgcaatggcgtgatcttggctcactgcaagctctgcctcccgggttcacaccattctccttcctcagcctcccgagtagctgggactacaggcatctgccactgcgcccagctaattttttgtatttttagtagagacggggtttcaccgtgttagccaggatggtctcaatctcctgacctcgtgatccgcccatctcagcctcccaaagtgctgggataacaggcgtgagccaccacgcccaggctgttcttgattatttaaaaaatttaatatctcaataccaattatactatttactgtacatttaaaatacattttcttattgctttcagaagtttaattttattatttttggtagggtttatttctgggatgtgaaattggttcaacatatacaaatcaataaatatgattcaccacataaacagaattaaaagcaaaaaccatatgacatctcaatagatgcagaaaaaggtttttgataaaattcaccatccttcatgttaaaaatccctcaacaaattaggcatcaaaggaacataactcaaaataataagagccatctatgacaaacccacagccaacagccagcatcatactgaactggcaaaagcaggcagcattccccctgagaactggaaaaaggcatggatgattattctcatcacttctattcagcatagtactggaagttctagccagagcagtcaggcaagagaaagaaataaaaggcatccaaatagaaagagaggaaggaagtcaaattgtctctcttcacagacaacgtgattctatacttataaaatcctaaagactccagcaaaaggctcctagaaatcattaacaacttcagtaaagtttcaagatacaaaatcaatgtagaaccattactagcatttctatataccaataatgttcaagctgaaagccaaattaagaatgcaatctcatttacaatgctacaaaaagcataacataccaagagtagagctaaccaagtaggtgaaagatctttacaataagaactacaaaacactgctgaaagaaatcagagacgacatgaacaaatgaaaaaacagttcatgctcatggatagaaataatcaatattgttaaaatggccatacttctccatgaatttctttaaaaaattgtatatatcgatttttatcaaaagctttgtctgcatacctctgttgagattaacaaagtctttttttcttatttgatgtgtttctgcagtaagtgattttcgaagattttctattgtcaaattatatatgaataactggaatgagttcaatttggccatgaccaaatgctttaaaaatacatcttcctattctatttgccacttttatttttcagtttcttacatctatatatatgagggagagtgatttataatttctcattatcacactgcttatattagttttctattgtgcctgtaacaaattaccacaagctttgtgacttaaaacaatacaattttatcttagagttctgtgggtcaggatacaacactggtctcactgggctaaaaatcaagttatctacagaactactttcctctctggagcttctagggaaaaaaatccatgaccttgccttttctagctccttgaggctgtctcattcattgactcatgggctttttcaaggctggcagtggcagatcatgtccttctcatgttgcacctctgactattcttctatcctcaattctctcttagacttacctgggaaaggttctccacttataaggactcttattattacattagaattgccataattctccaggataaactctgtgttaagatcaactgcttagcaaacttgattctatctgtaacttttaaaatcatttgccagatatcatagcatactctcagattccagggagtaggatgtggataactttgggtactattattcttggtaacatactgccttttttgatgttgttattgcagaaaatagaagaaaaataacaactgtgtcctggccgacactggctgggagctcattgtcagtagacatgtggtgaggcaatgagtcataaccaacgtgggtttctttttgtcccatgaaagatttggtgtgacatgagctgatgaaaaagaacttaattcaagtaataaatttatttctattttcacaaatttggaagttttaaaatggtaccctgtttcctggttccttgagaagttgtggggttgaaaggtgggaaatcaaatgcataatcagcatcagcattacattaaagagtacacgtgcaggtttgttacatgggtacattacatgatgctgaggcttgaggtcccaaaaatcccatcacccaggcagtaagcatagtacccaacaggggctcttcaacctgttcccctctccctcccttccccatcgagtgagtggtcctcaatgtctattgttcccatctttacattcatatgtattcaatatttagctcccacttgctagtgaaaacaatgcagtatttggttttctgttcttccgttcatttgcttaggataatggcctccagttccatccatgttgctgccaaggacaagctttcattgttttttatgatcgcatagtattccatgttttatatgtaccacaattcctttatccaatccaccatggacaggcccctaggttgattccatgtctttgctatcatgagtagcactgcaatgaacatatgtgtgcatgtgtctttttgatagaatgaattattttcctttgggaaaacccagtaacaggattgctgagtcaaatggtagttgtgtttttaggtcttctaggaatcaccacactgctttccacagtggctgaaccagtttccattcccaccaacagtgtgtaagtgttctcttttctccacagccttgtcggcatctgttgttctgtgactttttagtgatagcctttatgactggtgtaagatggtatcttattgtggttttgatttgcatttctctgatgattcatgatgttgaacattttttcatatttgttggttgcttgtatgtcttcttttgaaaagtgtctgtgcatgtccttttcccatttttaattggattttttttttttttttttttggggtttggggtaaaaat

SEQ ID NO: 78 - DNA, 38736 bp, Homo Sapiens
  genomic_DNA (1)..(38736): n is an undetermined nucleotide (dATP, dCTP, dGTP, or dTTP)
  misc_feature (1)..(1): n is a, c, g, or t
  initial_coding_region (7631)..(7729)
  coding_region (10476)..(10682)
  coding_region (12601)..(12687)
nccattcattccaccatgtgaggacacagtttgtcctatctggaagatgcagcaacaagataccatcttggaagcaagcaacgtgaccctaagtagatgctgaacctgtggcaccttgatcgtggacttctcagttccaaaactgtgagaaataattttctattttttataattacccagtttgtggtattctgttatagcagcacaaatggactaagaaagaaactggtaccaataagtggagtactgctgtatcgaacacctaaaaatgtggaagtggcattggaactgggtaatgggtagaggctagtctctaacagacgattctggtaaggactaagaagaagagagctgtagacagaacctcagtcttagagattattttagtggttgtaattacaatatcaattaaaatgtgggcagtgagtgccattctgatgtggtgtcagatgaaaatgagaaataattaaaaactggagggggccaggcgcagtggttcaatgcttgtaatcccattcactttgggaggccgaggtgggcagattactggaggtcaggagttcaagaccagtttggctgatatggtgaaacctcgtctctaccaaaaatacaaaaattagcctgtcatggtggtgcacacctataatcccagctactcgggaggctgaggctgtagaattgcttgaacctgggaggcggaagttgccatgagccaagatcgcaccactacactccagcctgggtgacaaagtgagactccatctcaaaaaaaaaaaaaaaaaaaaaaaagtggatcaaaggccatccttgttatcaagtggcaaagaatatggctgaattgtgtctatgtcccagggttttgtggaaggcagaacttaaaggcaatgaactaggatgtttggtgaaataaatatctaagtgaagtgttcagggaactgactgcttataataaaatacgggaagagagaaatgaattaaaagataaaatgtataatcaaaaagtaagtgaaatttaaagatttagaaaattatcagcctggccatgtgaagataaaaggctgttcaagaaagaaaattaaaggtatggccaagctactgtttaaataagaaatatatatgtgtaggtagaagccagatactattcactagaacagtggaggggtgatcccagtgatatttggaagatctttggggctcccattcccattacaggtgccaagtgctaagtttttattgacagatgaatggataaactgtgagatacacacacacacacacacacacacacacacactcatataattcagacttaaaaaaggagatcttgccatttgccacaacatggaagatactggagaaacttatgctaagtaaacttacccagacacagagacatattgcacaatctcatttatatgtggaatctaaaataacaacaaaacaactaacaatatagaattcagagagatagagagtgaaactgtggttaccaggggtagaagaagagagagagagagaaaactggtaggggagagcagcaggtcaaaagatacaaagtgaaagataagtaggatgagcaaatctagagttctaatgtacagtacaaagacgatagttaataacaaggtattgtatttggcatttttgctaaatgactagattttagctgctcttgccacacatagaaatacaaacgagtgactatttgaaataatagatatgttaatttttaaatttttattattatactttaagttctgggatacatgtgcagaacgtgcaggttgttacacaggtatacacgtgccatggtggtttgttgcacccatcaacccatcgtctacattaggtatttctcctaatgctatccctccccttgccccccacccccagacaggccttggtgtgtgatgttcccctccctgtgcccatatattctcgttgttcaattcccacttatgagtgagaatatgcagtgtttggttttctgttcctgtgttagtttgctgagaatgatggtttccagctttatccatgtccctgaaaaggacatgaactcattcttttttatggctgcatagtattccatagtatatatgtgccacattttctttatccagtctatcattgatgggcatttgggttggttgaagtctttgctattgtgaatagtgctgcgataaacatacgtgtgtatgtgtctatatagcagaatgatttataatcctttcagtatatacccagtaatgggattgctgggtcaaatggtatttcaagttctaggtccttgaggaatcaccacactgtcttccacaatggttgaattaatttacactcccaccaacagtgtaaaacaattcctatttctccacatcctctccagcacctgttgtttcctgactttttaatgatcactattctaattggcatgagatggtatctattgtggttttgatttgcatttctctaattaccagtgatgatgagctttttttcctatgtttgttagccatataaatttcttcttatgagaattgtctgttcatatccttcacccactttttttttttttttttttgagatagaatatcgttcagtcacccaggctggactgctgtggcacaatctcagctcactgctacctctgcctgctgggttcaagtgattctcctgcctcagcctcctgagtagctgagactacaggtgcataccagcacacctgactaatttgttgtatttttagtagagatggggtttcaccgtgttagccaggctggttttgatctcctgacctcatgatccatccgtcttggcctcctaaagtgctgggattacaggcgtgagccaccgcgcccggcctccttcacccactttttgatggggttgtttgtttttttcttgtaagtttgtttaagttccttgtagattctggatattagccctttgtcagatggatagattgcaaaaattttctcccattctgtaggtcgcctgttcactctgatgatagtttcttttgctgtgtagaagctcttttgtttaattagatcccatttgttaattttggctctttttttttttttttttttttttttaggcggagtctcactcttttgcccaggctggagtgcagtggcgcgatctcggctcactgcaagctccgcctcccgggttcacaccattctcctgcctcagcctcccgagtagctgggatacaggcacccaccaccacgcccagctaatttcttttgtatttttagtagagacggggtttcactgtgttagccaggatggtctcgatctgacctcgtgatccgcccacctcggcctcccaaagtgctgggattacaggcataagccaccgcgcctggccaattttggcttttgttgcaattgcttttggttttattcatgaagtctttgcctatgcctatgtcctgaatggtattgcctaggttttcttctatggtttttatggttttaggtcttatgtttgaatctttaatccatcttgagttaatttttgaataagctgtaaggaagtggcccagttttagttttctgcatatggctagccagttttcccaacgtcatttattaaatatggaacactttcccgattgcttgtctttgtcaggtttgtcaaagatcagatggctgtaaatgtgtggtgttatttctgaggactctgttctgttccattggtctatatatcttttttggtaccagtaccatgctgttttggttactgtagccttgtaatatagtttgaagtcagtagtaaccattttattctctatatgtatctcataatatcatgttgtatactttaaatatgtacaatgaaatttattttacaaaatgtaagtgcttgatatcctgatacttaatgtctaaatacttaagacatgtcccctaagaataatattctactatatagctttaatacaattattacatcccaaaatttattaatataataataatccaatatatagttcttattacaatttcctccattattccctaattataaaaatatgaggataatggaggggcttatgtgtttatatataaataaacacataaattatggttcactcatacatttggttctcttgtcctttgagtctttcataatctactcatagagcagtttctcaccattttttgtttgtttgattttgcatttattttagtcttttatgacactgacttttgtttttgtttttttagtctggagcatttgtttcatataatgccccatatcttggacatttcttcttgttttccatgagttcaagttaataattttaataaaaacacaacatagatgatgtgacttaccaacttttcattgcatcacataaggatgaacataataacagtttatttcaattttggtggtggttactttaatcaattgattcgggtggtgttatcagttgaatgtttatgtcttcccgaaattcatatgttaaaattctaacccctaaagtgatggtattaaaaagtggggcctttgcaaggcgataaggtaacaaaggtggagtcctcatgaatgggattggtgctcttataaaagagaccccacagagctctcttgctcctttcgaccatgagaggacacagcaagaagacagacatccttgaaccagaaagttggccttcatcacacttgaggatatgccagcaatttgacgtcagatgtcctggcctccaaaatcgtgagaaataaatgtttgttttttcagccacctagattatggtatttttgttataacagtctgaacagacaaagacaggtggtattcacatgctattttcattttaaaggtatatttttaacttcataactaaaaaggaatcagtagtcttatgcttttaagacaaagtgaatattatgtttcaaaaaatattttcactgaatggtgttagtatccattaaatttgtcatctcatcctctattctcagcctaaatgtattagtctactttattactcaagttacaactgaaagacggaaactcggatatcaaggtataaaagttttgcatttcctgggaacacataattgtagtaaactcttagataaattgatcctaattatgtgtcaatgctcattattcatgaggaagttagagaataagaaggccttaactctttggacccaaaacaactatctgagtttttgtttctcagctagtcctgtttcccaggtcccatctgcatctcagctttcatttcccactctccaactctctccttcacgaccaggggaatcttctattccctaaggacatctgtccttctcttatttgatcttatgtcagtttgacatggcatggtttaagtcaatgtttccccatgtagctgaggtgctaagtgcaaatattaactgattcagagaaccatcaaccttgtcaaaaccataaaactgctctttattagttgacccaaaatcataatttggacagagatatttcaagacattttcagatataaaccataaaacaaatataccaaataatatatgtaagacacaaagagaaagcaattgatccgaggctactatgtatataacaaataagattttatcttgttaaaacacccgcatgcccgcataaatcagtcagaaccagatgactctttctagctgttgattcctcctcctcacaaagagcccacacgcttcattttgcttaattgtcactttgaggaaaatgtttcttcctttctttccttcacacttccctcttttccttcattataggaagaaacttctcacttacatatgagaaatcacagtcacttttgtgaaatagcttatgctgaacattagcccttccttctctggatcccttgaatgctggaatagttaccaggctgtgttttcaactgaggacttcctgttgcccaatactaatgtatccaatgcagattacaagaaagattaaaagtcttgcaaacacatgaatttttttctttctatcccaagcatttaagactttcttagtacttttcttaagataatatatgcaaagggagagataagtggaggagttagaggaatatagtaatggaggaaggaaaaggagattttgcttactagtttctagcttttgttttccagcaatccaaagaacaatatctcactaaaaagtttatgatacatgctttagaaagatatatcaaaagagaagagttcctagagtacagggtatgagaggtatcatggaatggagggggaaacacgataaataagagaaggacacatgtccttagggaatagaagattcccctggtcctgaaggagagggttggagagtgggagatgaaagctgagatgcagatgggacctgggaaacagggctagctgagaaacaaaaactcggatagttgttttgggtccaaagagttaaggccttcttattctctaaggagggatccctagaactagaaatgccagggagacagttttgcccatggacctgcaggaacaagagatattttatggagaatgtgcacagagagttgtatatattgttagagaaacaccaaaatttatctccaactcctttgttgtcaaacataaatatctgtttctgagctctgccacgggaacttgggagcacttcaggtgagtgcagagccaggaaaagacgcatcaaaatgagtagaaaaagtcgtggcattttactcgtcctggcctctttcaccctgatacagtgagactcgatctggagaaaaccctgaagtcccagcttctcccttagggaagcaacaggagtgggccatgagtccagcattctgggtttccagcggggttgcccaaggcactggtttctgtcttacatgactcagagtgcagagtttggatgccatgttgggggcctctgagaacaaaggcaagcaccctgtttcagcactagggagattgtagtactgaaggcggacaccagggggagaaagaggttacaggctccagacaagaaacaagcaaacctctttaactgggaaattacacacacaagcccataaaaagcttgaagggcccctagaatctctagctatgctaaccaataaaggtcttccaatgtatgaagccactctgtaatgactggaggaggttgggtgtatttttcaaatattaaaagcactgcaggataaaaactaagagcatgtctagtaaaatatgataaacatatctaagatgcatgctaatagacaaaaaataaatgattagagtgcatttgtctaaaaaattcatcaaatatatggcaatacagttgttgtcagtaggactgggcaaagggacattgctgcatattgcaaattttgtgtgaccctttgcctctggatattgggacctctcaagattcatgctgctgccaccctgtgatgtgtttattatctataatggactgtgtcaaacattatggaaaaatcctcatgataccaaggttgtgtggctttcactgctccataatatcagtttctttctctaacacacaggccaagtctggactaattggcagaaactgacttaccagttttgcagccagaacttgggagctctgtacttttaagagctaaatctattttttcttccgtagttggcaacaccattatgacatcacaacctatttccaatgagaccatcataatgctcccatcaaatgtcatcaacttctcccaagcagagaaacccgaacccaccaaccaggggcaggatagcctgaagaaacgtctacaggcaaaagtcaaagttattggggtaaatctaattcagaacatgttggagaggggttaggggaagtgggaagagatgatgtatgttttgggactggtcatccttgtgagtgtggagacccttaagttttgctggagggactttggggtagaagccacttggagaaaactgtcccagaacttttccacaggagattgtcttagaaacgttttttcccttattctgaatatgaggagttgattttctgttgttgtctttgtatttttgcaatacagtacttctctatattttcttttacgaaagtaatggtggtaaataatgacatattgtatatacatttttctgtatttcacaactgcatgcttaacaatccacactgattctttgcaaggaatttttcccttactgcaaattacagaaaaaatatacctcctctccctgttttcttcttacctttttgagaatggaaatgatatttaccttttatttgtctgtttctcctctcatccagagtttattaaagaagctgtattgcatgaagggaggagagaaagaagggatctatcttggattgggagggaaacacagagttttggtttctagaattgcctctgcacttatgtgatctgaggtgaggcactctgtttgactggatttcaggacctggtgggactggtttccttgcctcatgtacaatcatatgggtttctatgaggctcaggtgacaaaaggtctaggaaacttcttggtaaatgataatagagctgtgaatctctgaggtggatgtcaggaaggaaaactacctcctaagacagagcttcagttatacatgagaacatgcagtatttggttttgttagtttgctaagggtggtggcctctaaatgatgagaacacatggacacgtagaagggaacaatgcacactggggcctttcagagggtggagggtgggaggagggagaggatcaggaaaaataactaatgcacagaaactcaatttggaagctctggctacaaaaatctcccaaagccagcaaggaagtcagagagagtgcccagaaaaatgccagttctttctttccctcgttggtatttagagattattgtttggaaccctcagttacaatccaacactagatctgtgctgtgcaatgtaactgtctatgatggaaatgaaatgtaactttctatgatgatggaaatccacaacagctgcactgttacaatatggcggtcacatgtggctatcgatgatgtgaaatatggatagtgcaactgaattttaaattttacttaattttacttcaaatataagtagcccatgtggctactggcaaccatactgagtagcctagtacaagagtaatgttttcaaacttttagtaggaaatatatgggcctcttactccagagaacaatcccacagtgaacatgcaggaagctcaaggatgcaggatgtggtctcggggtgggctcagactcaccagagacatcgaggctttagtgagttctactcttgtcacacattgtaccagccctttttgagattgaagaagagtgccatctcaagacaaatctagcttattctaagaaatatagactctaggcatcaagactactactggctactaggaggcccaggagtgtacacttcagtcattatgttgggaaattggggtcccagagcatcaactggtgagttcctaaaagaagaagtgcccatatgggattaaataacactctactgtatggctgtgggatgtgccctggagcctacctacctgtaacaatagctttcagaatgctgtgagctcagttctcttttctgtgtgagttggagtaaaggaagtcacttctgaggtcagtttatttatttcctccacttcataaatgtagaaatgagaaccagagtgggaaataaaaccaaggaactgagtacccaagggaacaagctgggtcaagtctatattgtgacctcaattttctgacatccagtccaggcctttattctgtacctcccgctgcctcccacacattacaccatccttgggcccgcacctagacctctgcccacagccaccccatgctgcgctcaatgtggccagtcatatgcctgcccaggttccagggcctgcctgagactcagaaccaccccctcactcatctttgagaggtgtgcttttgagagaggcaataggcacgcaaaagtgagctattaggttggtgcaaaggtaattgcggttttgccattgaaagtagtggcaaaacccaaaattacttttgcaccatgctaatacaccatccagattttctgtgtggttgatgcttgcacgaggggtttctgagttggccgagagagaaactgcatctggtacattgccacctttgcttgtggtcacactcacagtaattttccaggcaagcctcgtgggccctgctatctgtcccagggaaagaatttaggagagtaacattctctaccacactactgaggtcctgtttgaggggaaccagttcatatgttcattcattcagccaagttttacgttgcagattctgagtttttggctggacactggagaggcctacaacaagaaatgatccctccgggacttcctgagggagacagataagggaataacttgcaatgtaatggcaaaaagggataagagagattcgtggccctttgggaatgattcttacccagcatgtctctttcaggtgcatagcagcctggctggaagcattctgagtgctctgtctgccctggtgggtttcattctcctgtctgtcaacccggctgcattaaatcctgcctcattgcagtgtaagttggacgaaaaggatataccaaccagacttcttctttcttatgattatcattcaccttacaccatggactgccatagagccaaagccagtctggctgtaagtattttttagatgggatgttctaattttatgaggtttctgaaagccttgatttcttattattccatcctttgaaaatctctctgttaattctggtttgggcatctggaggaaggccaaggttatgtaaatcaaaggggggctgcatggatgagattaaggggattacatactaacagagtggaattgaaatgtcagataaggttgatgatgaaaaactaaaacttacggtttgtagagtttcttaattactcaactaatctaattttggaggcataaattatgagtttgtcaaactgagaatgttggtacatagagtggtgaattcagattggcaaacagagcagaaagacccgggtgatcagaaaatgctgacaaggaaatgtggtatgtgtgtgtggtagggggtcagtttggtctaaaaagacatcagactaaagatgaagaaacagagaataggaaatatggggttagatggtaagggtttctcctaatgattacaataatgaataatactaatcaggtgaaacggtaacattattattgctttttgttatagctgaaagaagtgtgatatcttaaatcaggagataagaaatatagggagatggagagtgtaactgagaattatcgcaggagaattctctctctttggaagaagaaaaacaatgaagtttggctaacagaaataatgtgtctgaagttgaaaaattaaggggtatgtgcatggccagcaacgcattgagaggaaaacaggcaacataaaagtaaagaagttgcagaatatttattgtcctgcaatcataaaaatgaggtcagccaagaactcacctggacgatggacagatagaaaggtctggtcaaattcatgcttgtacagcacccattataaactgagccttgcttccaaggtaatggtataatgaggaaaaagtgcatgcaaatgaggctgacagtaattggtacaaattccaccttgggaaaaattctggagagaaatttgggagaaatttggtagtgataaagtataaattcatgatgggacgattttatattggaaataagagagattctgttgagcttgcttgctggaacaatttctaggtaatggacacaacatgtatcttctatttaactgtgtgtaaataccacaaaacaaaagttcatgtgatcaaattacctccctttattatcagatgaccagttctgcacaaagaatgtctcaggacagaaatggtagaactcatccttgtgagttggtgttggtgattagcaacagtttactaccttcactgtttttttccaagtcttaaaacaccaaaaacagcaaaaataaaaaataaacaacaaaaataaaaaacatccaaacaggttcagatacatagacagggatgtcaatactgaattttacaaagggcttacacagccaaaacctccttgatcctcacaaatctctgagaaataaatgttagtatgcatgtttgatacatgaggaaacaggagctagagaaagaaagagacttgtccaggcttacacagctactcagcagtaaagatgagactataatggagctgctgattctcagtcctgggagctattacgccactctgctctcttactgagtgaacaatgtcatcagaactacgtacgtctcaaagaagtgagaaacaagtgtatgaaatggattagttgatttagttactactcatcttcccttctcttctcaagaaactgaatgagtgaaggagttgaattaagacaattgtgaggaggagcagttttgttttcctgattgtttccttacttcattctctaatggttgaggtggtcttcatctctatggtcacctctaaactaggcatgaaagcttcggctgacccaagcatcactgatattttatttcttgactttcagggaactctgtctctgatgctggtttctactgtgttggagttctgcctagctgtgctcactgctgtgctgcagtggaaacagactgtctgacttccctgggtgagtgtgctggccagcctcgcttaatcttgcctagtgtatcttatctctgcactgtgttgagtatgtcaccaagagtggtagaaggaacaatcagtcagtcatgagatacacatgggaggtcatttaaatggtgatggaagaccgagaagaaaagcagatggtaattgagtagctgacaagctgagagttcactggatatgaaaatagttaaaatgagaaatcaactggttcaatcttcccattttgtcattgaagggaatgagactctgggaagttaaatgactgggctggcattatgatatgagtctgtacctgtgctgaggacgctagaacctggcttgcctcccttctaagcagaaacaatttctgccacaaccactagtctctttaatagtattgacttggtaaagggcctttacacatgtgactggatccagtgaatgtcttatgctctgcttttcctcctggtgattttaaaattctttttccttttaaaagatatattaaaaatgtattgttgaatcaaattccaagggataccacccctatggacttattgctttatttaactgaatttaaaagccttgatttatccagaattttattatagagaatagaagaatactagactgataaattgtaattatttgaagaacccagtgatctgctctacttgtcttggattagctaagaattctatgtatacagttggaaaaaatggcatatccacatgtatcttgaacctgagtaaagtctgaagacctaacatactttgtttcttctaaagtgtgcttttcctgcctcacagttactcatgtcctcaaagacgactcatgatgctggatatgaagaactattgacttcttgggaaaaaacggagaaatattaattggaaagttgatttttatgataatatggaaaacctaaccattataaaaaagcaaacttgagtttcctaaatgtaagcatttaaagtaaatgcatatttgttttaaaaaattatttcgctgtcatttatgatatgtgttcattggggatctcttggtttgcctgatactgacttcagcaaaagcacagggctgtaaattaccatttactagactagccaaatagtcttagacatttcccagaaaactaggcagaatgatgattcaatggatcacagtgaggcaaaggatacagctttttcttatactcctcaattgtgaacaggagttaactgatttgctgtggtgcgcagactcttttatcacaggtgctactgatttatcccatgtattttactcattagtgcataaaggcaaaccccataatgaagtctccgagtgtatgaaagtagccggcttcaaaataaaatctttgagtgcatactttattttaatacttattttgttattttttcctttaaacacagaataaatcaacaatgacagacataaacccaaattttaactcaattttctcctcaccaatattcaaacaaaactaacgagtgaacaaatgctaaccaggaatgcttatctgttatgaagagacaaccagttcatacttacgtccttatttcaaaataaaaaagacgaattgtttgagtataacaaacataagcctcaccttgctcatgcacacacacgcacacacacacacacacgtgtaaaaaagtatttcaattttatatgacctccatttctttgaaagattttgtcatatttccttgctctgaccctctgtagcaggggtcatacttcatactcactgtctcagatatcctgatactcagagagtttctctgctctttttttccagtctcaaatggaactgtcagtttctttgattttagctttatcttcaaatctgtttcattaggtcttctccctgtcctttgcaccccccactgacacacaccatttcttttatttatttgcctattgtggacattcaacttttattgatacttattggataccagacactatgcttttaatgccagggctaccaaagtgaataagatacatgatttggcttcaagatatttatagtcaaataaggaaaacagagatgacaatgaagttagggatttcgctaactgttatttgagcacagaataaagacactaactgttatttgagcacagaataaagaatatcatcttctgcctaaaagaatgtagaggataaacaagtgtgtgtgtgtgtgtgtgtgtgtgtgtgtgtgtgagagagagagagagagagagagggggggggagagaaagacagaaaagacagaatgtacttcctttgaaaatccacctccccactattaatcacatggtgccaccttccgccacaggagaggaccattgaagcattgtcatttgtctggggtaatatcagaggttcattgtctcatgccaagaaaattgaagacatggacacacaaagagtgaatttaagagcagaagtttaatggctaaaagaaagaagagtgcttcctcatgcagaggaagggatcccgaatggatttctgggtttggggcaagatgaggctggttttatagatgagtctgaggaggtcgtgtctgatttacatcaggcatagtagattggttggaccagatgtgccatttacatagcatgggaagtgctggccatcccacactaatcttttattatgcagatggggtctccacctggccggcaccatattgcctgcttttttgctgcacacatggtgacaaagaaaagggaagagggaacctccatgcttaatatatctagcttccaggtatcccttttctattggcacaactgctggcattcacctttgcaagcttccagcttgcttatctattcttgcagctggatttttcaggcttcttttgctagacaagaaatgatttgggggctgctttttaataaaaagaaaatcttactgagaactcccttaccctcactagctacttaaataatttctttttagctcctgtgttatttctcccctcagaagtagtaaccctaactgctgttagagggtgttggacagtgactctttctgactacttcctgctgaaaaggggcatctagtggggacagcagctagggctcctcctgagttcaatctaacggtcctcagaagaaaggcgtgtccgtgtgtggttctgcctgcagcaccatttaaagtttgcttctaggccaaaagagataaattttacaagaaggtttagaatacagggtttgaatatgagtattaagattaccattattagtgggggtaccataggccataaccatgccagtggagtttgatacctgttagccattttaatggcttgtaatactagtttgcctccaccaggtgtcgcttactttactagacgcgttaatataaaaggaaccttttttttgcataagtgtcccccaattattaattctactataaagattataattagacagaatattacagcaattagaattttccaaccggaattccatattgcaggtgccacaatgtatagttgtgttgcaaatagtagagcgcatgtatcaattcccggaaaggtggtgtagtagataatttacgtctaaaacttttactcgccaagatgtagaatttctccttggggttctatgaagttacaaatgtaatcccatgtataattaaaatctccctgcaaatatgtgttaaaaagaagtgctaatatctggctgcgaatctcgagaggaaatgttgaaatgacaaaaagtatctggtgagttaaaggtgggactgagtaagatgggtagcccttacttacttacttatcttttatgattttcagcttaagatctcctattttttgtcattgatgtccaggacgttcttctgggctgtcagaggttgctctctcagctttccaggctttgactggagtgtgatgtatgcaggaattaatacctgtaacttttactgctgagggggttgaaagaacagtgtagggcccttcccagcttggggtcaggaagagagagagaagggagagctttcaccaataccaaatctcctgggttaaataaaggtgatcctatttcttggagttgggcttttgctaactgtgttaattcctgctggaagtgagccagagaggttacatgctcaaccaactcagagatttcttaatttaatagaaaatcattggtaaggaaagaccatccatacagcattttaaaagggctcactttgtctgccattgtcactttggaggtatttaagtagaccacagcggggagttatttcattaactaacactttattacctcagatgccttttctgtatggcatgaaaatgcttctaaccagttggcgaaagtatctgtccctaccaggagatattggatgcccttcatctttggcatgtgggtgaagtctgtctgccagtcctcccctggatagcttcctattctttgggtttgaggaggaaggagccacctgttcaggggattatttttaagacagatttcacaagcattaacaacctgtttggctgtttttggtaagttctctcctgaaaacaatctctgggcacattgatgagttttatcctttcccaagtgaaaagcttgatggaggattttaaggactttccattggctagagactggcaagtagagtttgccatcctgactgtagccatcctgagagctggaaaatatacacttgagaagtggcccattctatttctgcagggaagtactgaggtttaatttctttatggaaccttcccagattagaggggcttgaagtccatagatgtcttgaggcttccttgctgctgacttagctgcctgatcagctaacctatttccttcagctacttcatcttttcccttttgatgtcccttacagtgtagcactgttatctttcatggaaggaaaactgaggatgataacctgctaatttcctggtggtttttgtttgtttgttttgttttttttgtttgtttttttgttttttgttttttgtttttttgagacagagtctcactctgtggcccaggctggttgcagtggcacaatctcggctcactgcaagctccacctcctgggttcacgccattctcctgcctcagcctcccgagtagctgggactacaggtgtgcgccaccacaccaggctaattttttgtatttttagtagagatggggtttcaccgtgttagccaggatgttctcgatctcctgatcttgtgatccacccgcctcggcctcccaaagtgctgggattacaggcttgagccaccgcgccctgcccctggtggtattttataggagatccattagcagtaagaaagtgtctttccttccaaatggcaccatgagcatggagaactaagaaagtatacttggagtgtaaatattacctacctttattttgcttaattcaagtgctcttgtaagagctatcagttcagctaattgactgcttgtggctggagagagagacacactttgaaagacgtcatttagagtggctactgcatatcctgactgtggagcttcacagctactatctgtgaagagggtctagtctggattttctaggagagtttccctgagatactctctggctgcattggtttgtattataacttgttcacagtcatattcaggttccccagcttcctctggaaggaaagtggctgtgtttaggtgagaacaagtgtttaactcaattgtggaaatctctaacaacagagtctgttaaggagctggctggctgttagccaaaggctccccctagaggacagcaatcctgccacattatgtggggtgtaaatcatttcccagggttaatttggtggcttctgggaccagtagggccactgtggcaatggcttggaggcatgtataaataataggtccccccaactgcaactaaggggttgagaaaaatattagattagaatttttcctgagatgcccctcacgttcatgctatgggaagaggggaggcctggattagacaggagaagagactggctctgttgtccagaaggaggtctaccttccttcctttaatttccagaatcacctggggcttctgtgctgttcatgacagtttgagccactggagctggaggtttgagccccaggaaccatcagtcctattggaccatctgtgagactggttctgaaactggtgacttctgtctctgggagcagtctgatctccagtgatccatgctacagtctggacagggtcaaggtgacttcttgctgcctggcactccttcttaaagtgccctgacttgccacatcaatagcatctagcggatgcacctgaggaatcctgggctttgcaagcctgcaaaacagctactggaggctctgtccttctcttgtgtttcctctctttctcttgggcatcctcctgtccctatttaaaagaccaaagtggccatgctcaggaggttctccaaggtgctatctggtcctatcacctgctgctgtagtttcctcttaatgttgggaactgcctgtgtaataaacttgttctttaggatgagccatcccttgactgaataaggggataggaagtgtgttttattagtgtatctctcagcctttccataaaggctgcaggattctcatctggcttttggtctatcatggacagtttagaataattaaaaggtttggccctagttctttgtaggccctctaatatacacattaaaagtgtttcctttaccatttatctgcagaactattggagttccaatcagggttggcaaaaagaactgcttcccttcctatttggaatggtgtttccattattccttcaccttctctgtctccttttctccttttcagtctactataaaaaacatgttgttcatctccaaatttctctgctagctgcagagctgcctgcttttcagctgcggtgagggtttggcttagaagcagcataacatccctccatgcgaggtcaaacacctgagttaaagttcggaaagcttctatatacctattggggtcatcagaaaattggcctagtctccctttatttgccaaaggtcctgaaatgagcaggaaatgtgaatcctaatagcacaattttcatcaggcatttcttgtaggggtaagagtgaagcagggaaagtgggtagttttagagatagtgcagctggaggagctggtggcatggttagtgggggtcccagataagggagactggaagggttgagacactcagtagctgtctcagattgtccccctggaatatgctttagttttggggaatcatttcctatggaatttcctgacatggctgctaaaagagctaggttgattgtgcaatgcttgcaagtctgggttatcttgcagggcaaagaaagcctgtacataggggatcttggatcatttgccctcccatctgtagaaaagatctaattgttggataatattaaaatcaagtctccaccgcagtgggccaagtctgttcatccccaagatggtaagaagttgtacaatagaatatgagatgctttttttttcaaagtctcagggtcagaggagtcccaatgttctagaatgcactcaagaggaaattcaggccaaagacaatctgttatgcatctagaaagagaactgagaaaaaaaaaaaaaaggcctatctttagtctcattccttttggtatgacacagggtggaggcgaagacagtgagggcatccaccctactgttttctctccttgcttcctgtggtcccagcaccttgttaaatgtgctgcccatggttgcaggcataaccccccaccccagccatgaaactggaggaactaaggaatgggcttagtcatgcatacccatgcagccctagttctccgcttctgattcccctttgactccctagacttgtatgatctgcatggctccccaaaagatggatcttgggaaaggctatgtaatagttacatttgggcaagactgctttaatgggaggggtgtactagattgaattctatattttgctattatggcccatgctaaagtgtttacccttagacagcgattcgggttaacttctggacataaaatccccttaccatttaagtaccattctaactaaaggcagaagaggtttctttaaaaaacccaggaaccaaatggtggttttcctgctaacaggacagtctcagaactaaaattggaggacatttttctcctaatggttaaaggtagagtttttttccattcacagaaggagcataaagcctggtctcttgtggaggggcgcacaaagggaggaaattggaaaagctagagtgtttcagcaaaggactgacaatgtgcccagtgagaggattcttattccactgggtgatgctgttgacctagaaataccacgtgcttgccagatgaagggtagaaagagtacagctcatttcagggagaccttctgctcctagaaaatcacaaaaatggcattcccttgagctatattcccagtttatatggcatttgctaatctttcctaacaggactatttccccacaccataaaaatctgtgcagcattgcatacagaggataagagatatggcagtcgcagatggaaaaggaggaaatttgcaatagaaaattggatatcctgttgctgatgccggatcaagcaatcagaggctggggtcagtccagaaggcttcagataacaccagggtgtaaccctggcgagaaatcctcatttgctccaaaacctcttccagccccatgcaacagctaggtactccatgaagagaaactgattcaaaatatggccaacatgcccagtaacctgggggattggccatggtatctccaggaagcctgtcatctgagacttgagaacagcaggtggtttgccctaaaggcatgtagatggccatgggatgcccgggatttttatttgatttggttttaaaatggtggctaagagcctcaaaatgaatggacagaattgaggtccacttctatactcaggagaagaatgggagtgaagaacaattagacaaagtctaaaagatttctttcaattcacccagagtgaagagaatggggtgggggtggataaaaaagtgcaataaagttaggatagcacaaaaagcactttttgaaattaaagcactttaatattgtcttgagaatcaacttatgataagcttttaatattctcaattatccttacaaacacctttcaacataagtaatcatctctacatttagcagatgaaaaagaggctcagagggatgacttactgtatccactagactctccagtaggcagagtcgggtattgagtggtttgagcccttacagacactaggtctgcttagctcccgtattccataccaagagggtttgggcaacatctggatcacggatccaaagtacaccttctgcctcctagtatgtgctacacctaggccacgcacctccaatcccttggcttttcttcttaaaggaaagccctgggtgatggctgataggcagaatattccatgatcttcctaagggtccatgagggatagcaacctggaggtcattgttactctccaaggctttcagaagctgactcagtttattacttctcaggctgccaggcaaacaaacaaaaaacactctttctcttctaatgaatgaaaagctagaagatgttcacttgggccaaggaaaataatcagggcgtggtaggcagctatagtcctgattctgtggttttccatatttaggttcaacctcgggtcattggctgagatcagctggacctgggtgtcatctgatcacttttgttacaggaccagtcctgagcctgtgcactgaggcctcttcagttctttctctgaaccagtaatacaagattccaaatgccaggtacaggagaaacccagtgttggagttttcttgtcccaggtttttaaaagacacgtaaggacaaaggatgtcaagatgtagaactttgatgttcaactttctccttcagtcttccttacttgaccttctctccagccctgaaggaaatataccatttccatgccatgaaattgccccatggacataattgtggtgcattctgactagacacaatcaaaacacagcaggacttgcgtttcactaccagtccctaaaagaccacataacagctaccacatattcttactgaaagagcctccctgggtacttggactccaacactcttcatgctgatcatgtaaaaactgcagtgttgcatgtcctttcccagcttcctctttcccagggactttcatatcttgactgtttctcttgcagtactcttggagcttttctccaccaacaacttgctttttttgttttttgtgtttttttttgcatttcaagacacatcactttttgtttattttgttatataaattatttgctttcaaatccattgtttttcatgcataaatgcatggccatgtctatttcttttagttaaattgtctgtctggtcatgcacttcatccatttatatttttttctgtctttctttctcttgtgccttattatagatgttataaagatttatcccttgttataatttggctttgccttttgaattgtttatcagatttttatgttaatttaaaaatgctgaaatttttggataattaaacatattttatatgtgtagaaattgcttccaaactctaaatgacaacaaggaaacagacatcttttttcttatttttttaatcacttggcattttcttatttatagtataagtatagttatagttatagtataagttatagtataagtaatatgaggcaggacctaatgtatatattttaaatcagaaataaaattccaagttccccaatcaactgatggaccctcctcttggccaagggcattccaaaattaacctgaaaaactagttcaggccatgatggaaagtgggggttagacacgccgcattatacaatcctttctttggaattcaggcacagcttaccagcattaacattaaaacagagacctcaagattgatggaacagtctctttaagtccaataggaaacatttacaatctattcacgctgaagcctgctaccaggagtcttcaataagaactttggtctccacaattccttatcttaagccagacactcccttctattgattccaggtctttagataaactctttcaatcaattgccagccagaaaatgtttcgagctacttatgatctgtaacccccatctccagcccccactttggggcatagcttggttttatacattttagggagacatgagatatcaatcaatatttgtaagaggtacattggttctgcacagaaaggcaggacaactcaaagctgggaggggtcttcctggttataggtaggtaagagacaaatggctgcattcttttgagtttctgattagcctttccataggaggcaatcacatctgcattaattcagtgagcagaggcatgactttgagttctgtctgcccttgtccacaaggaaattccttgtgagagaggtatgtggcttatcttagtaggtatctttattttaggaatagaatgggaggaaggtttgccctaagaaagtccctgcttgacttttccttttggcttagtgacttgggggtaccaatatattttcctttcacatttctctcagatacttttgagtttacagtacacacacacacacacaaacacacacacacacgcacatttaaccacttgttctattattacttactgagttaactgtgtttctgtctatggtttaaaatatatttttaaaaatacactcaacatttatttacattcattgtagtactacatttgtctagtctcatttttttgtcattcagtctatttcaacacaagtaacacatcacttgtattagtacactgcattttaatttctgacagtacaatccttacttcaacactactctttattaaaatgattttgggcctggtgcggtggctcatgcctgtatatctagcactttgggaggccaaggtgggcagatcacctgagatcaggagttcaagaccagcctggccaacatggtgaaacgccatctctaataaaaatacaaacattagccgggcatggtggtgcgtgcctgtaatcccagctactcaggaggctgaggcaagagaatcacttgaacctaggaggtggacgttgcagtgagccgagatcacaccactgcactctagcctgggtggcagaatgagactccatctcaaaaatataaataaataaaataaaatgcttttggctagtaagactcattccacatgaacataaaaatcattaagtcaagttccacaagggttttatttggaagcacattatattacatctgaaaaaaatttggaataattgacaaccagaaatatgtcagtacagtcaagtgtccatttgccttcctaaataaaaaatgtgtatcttttatcatataaattcttcatgttttcaattaggtgaattaccaaatatttcatattttgttttaatatgaacactttagatgtttaacctggttattaacaattaaaaatctataactattcattgggcttgaaattaatcttactttggtaacaaatatttgtattatttacttctagttttattgcaattgattagttaacatggcctgcaatttttgttttatttatttggaatggatatatggccaattgttgccaatgtaccaaggattcttaaaaagcatgctttctttagtgttgattcattcaagtattttataattcaaatcatattttttggcttacattcatcaaaacttatatttgttaaaaattttcatgattactatgtttttgttagtttctcatactcaggcacattttttattagtagtatattatattatttgatcataaaattgtaaacaacatattattataaatgaattcctttgtcatatttaagaattttccttagacattttattgcctaatattaatacaccatcctttgtcttattattttgcattttctgacctttatttgcctttccttacccttacattcactactataataggaacctttggaatagaaatgggattttgtcactgtgctgcttatatccttctgtggctacacattgtctctatgacaaagcccaatgtctccaggaagcattcaaagccctgtaaatctctcattttgcacatccaggatcttatctctctcccaactgaatctgtcacttctccctctgtgatagaataataccaaagtgtttccaggtctgctagtaagccaaactgtttcagaactctagtctctgcacattgatccctctaccgagaatgcatatggctacaagcacctgctgttctttgaaagcatgatttgaaagttaattttcaatggagcctcctcttccaagagaagtttaatatctgacctttgtgctcccatgatgctccctatgtactgtgtgacctttgtgctcccatgatgctccctatgtactgtgttcaagggcagggacattatcttccacaggtattgttagtctctagcagtgttgcatgcaccagatacttaataaatattggctgaataaaataattctgaatggtagctcatttggactagaaacccaggataactctagaaaggtgggacaaaaatggcagtcttgttcacatatacagtggctgtcacttaggagtccctcccgtgtgaagcagagaattgttgctgtacaaatctgttttcaaacatgccttcatggaaagagagtaacagcaacatggaaaaatatgtgaatttggaacaagagcaaaataagatgacagagcaatagtagacagtgtaattacttgatatcaatgctaggcagtgtattagcatatttcttttgcacaattgggtgcacaatagtagcattaaatgccgcagcctgtgatgtattcatcaagactcctcaactcagtatcaatttcctacagcctagaaaaactgtttgtctaagtattcattaggaagagccacaatttttggtgggaggtgagctaaactttttacttggttgtgtcagtgtttttcatatattaatccagataaagatttctattgcctctctccaaatcatttttccattatttttccaaagaatggcctgctttcttaatttttccctcctcattttccatccttcatttccagggccaagagtaaagggttttgatcatttactgatattgtttgtctgtgtccccacccaaatctcatcttgaattgtaactgccacaattcccacgtttcgtgggaggaacccagtgggaggtgattgaattatgggggcgggtctttcctgcactgttctcctgatagtgaatgagtctcatgagatgtgatggttttaaaaatgggagtttccctgcacaatctctcttcttttgtctgcctccttgtgagatgtgccttccactttctgccatgtttgtgaggcctctccagacatgtggaactgtaagtccaatacacctttttcttttgtaaattgcctagtctcaggtatgtttttacagcagtgtgaaaatggactaatacatttacctatctaaattgcaatctgaattggagaaacagtggtctttgtgacattaaataaattattttttgtgtttctaaatggaaatggaggatgaaaagggagaagtacattatcatacagagaaaatctaaacaaaatatgtaggctaatgtatctgaaaactacagagttgaagcaaacttcaaaaaataggaactactggtttagatgtttagatgtcatggagactccagcccatactcctgtgtacacctgtgcagtgtattagctctaccctctactgtgtgttggcttaatgcttaggcctatttcccacctcttagcaaaaatttccacatcaagtattggccttacatccatttatcatcctgcagtttggaagaatagtgttgtctgaagtttcaaaacaagactattgataatcattctgacgaggccatgtaaggttatatgtccacattggttcaatcattgcaatggaaagtgggggtgaaaagcactgattgacttagcctagagccagagcacagtggaggcaagggcggactcagtcctcagagttacatggatccccagtcagaattcacagactgtttgaaagaggaaaatggaagatggattctgggcaggcaacaagcgcatgctacaggtcactcctttgtctgccctatgcccaaaaacactttcttctgatccatacttccaacaatgatcacagctacatgataggcattcagcttttcccaagaggacatcaagccagaaatctcatgcacttaacactgcattggaatatgaagggagctctgtctaaacagggaactctgtctcaatagtaacatgtgtttcttggccagacaattgagccacctccaggtatgttctccaggaagattgccttggtccattgttctctacaaccacatccagcatgggaactaaaaaattgcagcttctaggagcccacttaatatttggtacaaatttgagggcctagatgccaatcatctatagttgtttaatccatagggcaattcttgggtcttccaccaaggaataagaaggaaattaaacaaaattttgtcagtctaatagaataaattacaaaaatttaaaaaattaaagcatggtgagtagaaagaaaaatataccatgaaacatttaaaatttgatatattagtaatcaaaataaaattgaatacagaatactatttaaaataaatattaaatatattaataattagaagacatatttaaaatatacatataaaattaaataaatgactaaataaataaaacactatgccctgagaagtgagttttgtgatactaaaaaaaagacaattgaaatattattcaaaatattcagaagatttttttaaaagggaatgctcacaaatttattttaaaagatcttgatctaaaccaaaccagagcaataagaaatgggaaaattttcagatatttttcaatctctgaaaaatcatatttaaaacacaaggaaatataatcccacagtgtaacatatatcattcccaaggtgtaattatactgagaatgtatgggtgttttaataatatttcactgcggacttcagaggttagcatgataaagaaggcaatcctgtagaacttagtgagggagcagggcaccacgtggccacatcactgtagaccctgtccctcacagtgacctgaaaacagccaccaccaatacagcagagcgcacgcacctaagctcccaggtatctgccatgcaaggccacctaagcccctagctatctgccatgcagagatgggttatggtttacagacagtcccacccctgaagagagctctgtccttctgctatactgatggtactttggtggactcagacaaaggcactgcccaacaaggactagacaccctgttgatccacatgcagcaacacagctaggcctttaacacagacaagatacaaggacctaatgatacccaaatgaaactaataaaactcctgggcataattcagaaaggagcaaagcctctcattgcaaagatgattgtcaagattttgacctttttttttccctccccactccctcaaaaaaaaaaaacccccaaaagagcagcaatttgtagacctatttggctactggcagcaatcccaaataccccacgtagatatcctgaaagtattcatctactggcttacaataaaggccactactatggagttggaccccgaccaacaggacactcaggaggacctccaaagggccacccaccccacccttctcctggaccccattgactccatttgctgtttgaatcacaggtctcagcaacctctcagttcactgagtggagcctatggcaaaagaacacacaggccatcgggctttggattcataaacgtaactccccaccccttaagtctgggctgtgaatagtgacttcctttcgaagaacacagaatgtaaaggggaataaaaagagtagatttacagtgaagaagcctgacatacactacctcaatcaagtgactaagataacagtggtaagtcatgttgatagtgtggactgttgatgggatgtgatgatactggctctttacatctgtgatctccttccacaaaacccaaacaccagtctaatctgagaaaaatatcagataaaccccaactgagggagtttctacaaaacacctgaccagtactcctcaaaactcttaacgttataaaacacaaggaaagtatgaaaaactgccacagtctagaggggcctaaggagatggacacctgactggaatgctgcaccttggatgggatcctggaacagaaaaaggacattagatcaaaatctaaggaaatctgaataggacagtatgaacgtcagttatcaatgtttgttcattaatggtgtatcatactaatgtaagatgttcataattggagaaactgagtgcagggcacaggagaactctctgccatcttcacaactcttctgtaaatctaaaacttttctagtataaaagtttatttcaaattgtttaatttctcttttgtttttcactctgtattctgctaaaccatgttgtccaacagagctcactaaaatggcacatggtgaattcacaaaataagatgaactctccaattttacattatcaaccatatacacacacaatttgtatacatacacagtttggtgtaaattctcgttcaataccaggttcccaggaagaaataaaataaaaacttaaactcctttactttgggagttaagcaaacactctcaaaattattctgcccccatttttctgttttgctacattttgttcagagatgtttccttcagattctgcatggggttggggattttttttttattggcattattccaacttttcttagtacccgtttcacatttgcaaaatagagaagttgaaaccaaaatcaagccccttaaacaattagcccagggaaaattacgtttctagacctcatacttaatctagacctatgatattatttccaaacaccaaagcagtaactcaggagtatctaaagaaaggagggtagatggagaacaagaaaccttgattttcagcctcaaggatgacaataaactccagatttccagaatcaatgatttgtcttaaaatcagttgacgctgaattcaggcaccttttcatgctgctttcattggaggatggagaaatccacgtgtgcatattatgttccctctcagagcattagagccttagagacattattggtgataaaaagtgtcaaactctgtaaaatatttgaagagatttattctgagcctaatatgagtgaccatgacccacgacacagccttcaggaggtcctgagaacatgtgctcaaggctgttggggtgcagcttgcttttatacattctagggaggcatgagacatcaatcttatacatttaaaatatatattggtttggtccagaaaggtgggacaatttgaagcaggaagtgagtgatggggcagcttccgggctataggtaaatttaaacattttctggttgataattggtcgaatttatttaaagacctggaatcaatagaaaggaatgtctgggttgagataagaggctatggagaccaaagttttatcatgcagatgaagccttcaggtagcaggcttcagagataattggttgtaaaatatttcttttctttcttttttttttctttttgagatggagtctccctctgtcacccaggctgaaatgcagtggcacaatctgggctcactgcaacgtccacatcctgagttaaagcgattctcctgcctcagcctcccaagtagctgcgactacaggtgcatgccatcacacctcgctaatttttagtagagacaaggtttcaccatgttggccaggctggtctccaactcctgacctaaagtgatccacatgccttggcctcccaaagtactgggattacaggcgtgagccaccactcccagccatggctgtaaaatgtttcttatcagacttaaagtctgtgttgatgttaatgctggagaggtataaagaggcatgtctcaaccacacttcccatcatggcctgaaccagtctttcaggttacattttaaaagagccctggctgaggaggaagtccattcagatacttggggccttagaattttatttttggtttacattgtggtacttttgcaaagtttggatatttgatggtggtcccaggtgtcaaagtcactcttgaggcacttctgtcccattggccttgctcaaaacctcctgatgtttttttcctctctggtctctgtgttcctggcatcctcatgttgcatcaagtgaaatctgtctctagtgacaaaagtcctttgccacagtagctatggccactatttctttcaatgcactcacttaggcttctaaagcaaaccttacaggcacaattttcctcttgtcctcactgtaatttcagccaaagaacacctctgagagaaaggctgaaccaaagctgctatgagggcctagggagccagtggcccttggaggctcaggacagctagtcacggtgccactgtgctccattctagaactgagcatctcctcagcctttgaactgtcaggcctgagtgtggtgcttcatacgaaaatgctgtagtacttcagagaaacagaaatgtttcttttctttggagcatttatttctgcaggatttatatatgaccctagaattctgcatccttttaaagcattcccacattttggaaggcttttgctaagctgctaacaattcatctgcttcttaaatggatccatttccatatctgttgatgtaaagttgatgtggttcattgattacactatattctgttggtttgttttttgtttgtttgtttgtttgttttgctttctggcctggacatttttgtcttcctaacatacctcttacattgattcttcaagatgcttagtgttcccaaagcatccattgttcaaacaaggcttgtccacttcatctcccagtgtcccatgacccccctaaatgacatactactgtgttaccagtgcggaaccaacactggacttgattgttgacttcaaaccacccaatcaaggctacaacagatgtaacacaggatttttcttggcctctttgccagctgaagacctccagccagtgacacccctgcccaggctttgcttgggcccaggcttactgcaggagatgccctatctactcagcctggcaggccacacctgtcttgcactccagcacagatcccatggccactgcaactgtgcaataagcctctggtgggagggggtgtgtgagtaagcaagtgtggggttgggccagctatttcaatcaccggcacaggagtgggctctgtgcagggcttgcagctggaccaggcatgtcacaagcaactcccgcagtggactctggcattcagacaagaggaacatggtggtacccaggcagggatgcccatatccctgaagccccagagggggtgttgccacattctaatagctcttttagttctgccatctgcagcccagtgaacagcggcatgttaacagctctgtcagtcccattgccctaatcctgcccatggctctggggctagctcggtcctgctgctacttcctgttgcatggggtggctgccctccactggcgaaggggaaagggccacagtgttacagctttttttgtactcacattcagtgggtcctgagttattgtcccacgttcaagaagaatgaggttatgttgacaattgaagggtgaggagggtggggaagaattttattaagtgacaaaacaactctcagcagagagggggttacaaggatggtcccccacccaaagtcaggtggtctctctcacccagaggtgggcagttcccatgtggctgagtcccaggcttttatgggctcagaatggaggagtgcaggctgattagtttgtgagtatgcagaaaaggctaaaacaaagacaccactcaaaagtgggcatgacaatgtaaaaggccaattatggaagtgtaggtacatgtaaaacaggggaagggtggtgaagggtggggaccaatcagagaaaagcatgccaaatgggaagagaggttctccatccagcctcagatttatctgagacttgtagcttggctttcaggctttaaactctctttgggttaaaggtggtgttcaccggactcctgcccctgtctgcctacgattgtctacctcctggcgctgtcagatgcatcaatctccccaagtacttgctttaatttatttttcaaagttcctagtctttgaacatatgtttttaggagaactaagggactaggaatataaataatacccctttcttctagtcccatatttacagtgacttgcaaaataagatacagcaaatgctcaggtgaaaaaccaaaataccactttattcctgatatgctgaaggaaaagcattccttcagttcaaggccaaatgaaattcaattgatgtgtccaaccagtcactggcagagctgggtcaccccaggcctcccccataagaggaggcacctccaaaccctagcaagggaagggaagaacagatgatagtggtttctagcaggcagactgtctccaaaacaaatgaagaaacacagatgggctgagccacacaagcccaagccctccttccaaactctgcaactttgtgcagcattcctccttccctgaagagaaccaggttaaggagaggaaagaaacaggtgtgtttctctataggaagttctgctggaaggaaatgtgaggctggagacagatgaagttccctcctaactgtggctacctctggggaaggagggagggggaggaggagacagggagagctttggggctacctgcagcattttatttctgtagagaggaaaaaagtgaatctaaataatcatgtaaaatgataatatcacttgaatcactgggggaaatatgtagatacctgttttattattttctgcatttttatctatgtgtataaagttttggaattagcatataaacattataaattattctgagtcatttatcatctcacctttctatatatctgattctttcagaaggaatacagaaaagaaaaagaagaaaatataagtctcctatgaacctcaaagttattttattattatttaatgtaccatttttatacagctctgaaatgtataaaagtccctgagtggcaaatatttatagttgtttttcctcatttgaccttcttgccttcctccttttttgtgtgtttcactgtagccccctcagacaacagtgagtactcttttcaggacaaaatgtcaggtgtgagtcataaagtgcaaaggaactataccctccagaacgatgggaaggaaaactttctgcctaagagatacttcatattaaccaagcagtagatttcttctcaaacaaatggaaagcaattgaagagaaacctcatgaaaacatagcacatttttgtttcccaacagttataaacaacccagttttcctttcccttctcaccccatgttcagacaccatgagtgtttcccaaactttggaaacaaagacctaagtttcaggttcctgcaatgacctgttgctgacattctactgcagtcgtcagagtaagtatggtggcagagttgcagctggcttggaagatttatttttatttctaaggacagaagcaaaggaagcccccacgttcactcactgaaaataacaattggccatctgcatttgtttctgccgcagcttcaaaagccaaggtagagagcctgctggtgcgggcaagtctggtcttggagcttagggccacttacagatcctgaaactcagggtcagcgtaggctcagaaaggtcactgatatccaacccagcagaccagacgtatgagcactctgcccagaagcctatttacttcttcaaacacacaaaaaaatatcttgagcaacttccttaactttttggggtcttcctctctcttttcagaatgaagatagttaaatgtaatagtaccccatggtgacaggatgagaaaatatatatatccagcacttagaacaaagcctgacaatgtaatctcatcaagacttaagagcttcctttccttcctcttccatctttccctgcctcgcttccctagatgatagagctagatgatagagctagactacccttccatagccagacaccagagctagatgatagagctagaccacccttccatagccagacaccctcctcacttcctccctccaacacttgcccacaggcacacctagaatcctcaagaccactcaagtggcttcctggtaccactcttgctagaccaaagaaaatggtaagatgtggagggaattatgcactcgattcttcatatcttcgatagtgttaaatggtccatatgctttcttatagctgggggcacatgcatttacacaaacacatgcacacacacaaaacacccttacataagtgtgtgctgggggaaagctatgcaactctgaggctccaaccactttttgtgtacttttcacaattgcccagcagatggcagcaaagtgtcctgaggaactactttttctgtataattcagccctatgtggcagtgtaaagctagaggctaaattgtccctctagatatataacagagcatagacaggagaggcattctgttcagtttcatctgtggcccgaagacaagagatgacacagaattgtgccaaggggcaggacagaaggaggagtcagcccccggagcaggtaattattcaggtagaatttagatctttttcgttgttgttgctcctgagagcagtattctgttaccaatactgtttagaattgtttaaaaatggatgctaaaaagcatatggcagtttgttattgttgtaaaattttctacagaccatgcttctcctcattgtctgcacctgaagagaccacacccaccacccgttcttgttttgccatagagatgacaatcgctcctaatttacacaataaaaccccattcacccaagtagaaattaagaaaaaagagccaaacatggttttctcaaccagattataaaacattaaagattgagtaaaagagtaagaaattgagtaagactgaaggaagaggatttcattagaaacagaatgtcatttggaaactgtactggagaatttcgttagaaggacattgttgatgttttgtgtggtttcctccctcctgtcactataggagaaggaaggaggaacctccccctcatctccagctcagagagagaggctggaatgggaccgcatggggatcatgttgtagatcctctgcagtttagggaaaatgagaaacttgagtccaacacaccaggagaaaccaaagaatgctaagacctggactgtctactctatagccagtgtttttatctattgctatataataaatcacccaaacgtagaggtttaacacagcacacctgttacctcacaggtcgggactctgggcatgacttaactgagttctttgcttcaaggtctcaccaagttccatttaaggtattggcagggatgaggcctcaaatgaggtttgactagagaaggatccacttccaagcttacaatgttattgctagaattcagttccttgcagttgtaggataaatggtctcatttcttgccaggtgttggctcgaggtctttgtaggatattggctagagaccactctcaattcctaagggctgcttatactctcttaccatatcaagactgcaacatgacaaattggtttctcaaggccaacaatggtgagaatgagacaccagtaagacagagtttacagtcttctgtgacatgatcatataatcacatacccaaaatcacatacatcctgtcacctttgcaggattctggttattcaaagcaagtcacagatcctgcctatatttacagggaaataactacaaaagggcatgaagaccaagaggcaggaatcatctagccaccctagagtggctctcatggtggcacaattaagcaagaggagtagattgtgtgggggtggtctgcacttccacctgtatgctgtgtgaaagagattctacatggatggtcttagagcttgctctgaaaagaaatcaggagggagcaaggagaccttgaagagaatgaggctggagattttctgatggacatccagggacaggacataggataatcgtcagctgccagctaagtccatgaggatactgagaggaagcccagccaaggaatcccagtgatggaaccacagatgcattcaacatccaccagcctgcatagcactgacatcgagttgggaaacggccaatcgagagagactttttctgttcctctctcctcattcctgcccctgactctgtgaggatcaggaatccctcttagcaatcctcagggtgaagagttagagaagaaatagcactgacccccactttacatgtcagctgccctgcctaaagcaggccaaactgaggaaaagaagaaattttaatatgaatgacagttggattttgatttttgcataaatctatattttaattactaaagtgactgaggaactcttctattagctgacagtagtaacatcttagatttcaaacaagcagcaggggagagctagccctactgaggatcttagaaagaacagttgtggggccaggcacggtggctcatgcctgtaatcccagcactttgggaggccgtggcggacgaatcgcctgagttcaggagttcgtgatcagcctggccaacatggtgaaaccctgtctttactaaaaataaaaaaattagctgggcatggtagtaggcgcgtgtaatcccagctactcagaaggctgaggcaggagaatcaccaggctggtctcaaactcctga

SEQ ID NO: 79 - DNA, 104644 bp, homo sapiens
  genomic_DNA (1)..(104644): n is an undetermined nucleotide (dATP, dCTP, dGTP, or dTTP)
  misc_feature (1)..(3): n is a, c, g, or t
  misc_feature (39)..(39): n is a, c, g, or t
  misc_feature (70)..(70): n is a, c, g, or t
  misc_feature (73)..(73): n is a, c, g, or t
  misc_feature (143)..(143): n is a, c, g, or t
  misc_feature (231)..(231): n is a, c, g, or t
  misc_feature (242)..(242): n is a, c, g, or t
  misc_feature (362)..(362): n is a, c, g, or t
  misc_feature (11659)..(11659): n is a, c, g, or t
  misc_feature (11699)..(11699): n is a, c, g, or t
  MS4A7_initial_coding_region (17493)..(17639)
  MS4A7_coding_region (19439)..(19573)
  MS4A7_coding_region (21068)..(21124)
  MS4A7_coding_region (23741)..(23947)
  MS4A7_coding_region (27037)..(27138)
  MS4A7_coding_region (28139)..(28210)
  misc_feature (32640)..(32640): n is a, c, g, or t
  MS4A5_initial_coding_region (64028)..(64180)
  MS4A5_coding_region (65149)..(65277)
  MS4A5_coding_region (66764)..(66820)
  MS4A5_coding_region (68118)..(68270)
  MS4A5_coding_region (82002)..(82109)
  MS4A12_initial_coding_region (91488)..(91760)
  MS4A12_coding_region (95210)..(95347)
  MS4A12_coding_region (96148)..(96204)
  MS4A12_coding_region (97865)..(97981)
  MS4A12_coding_region (100890)..(101000)
  MS4A12_coding_region (101182)..(101283)
  misc_feature (104561)..(104625): n is a, c, g, or t
nnncttgagtcaggatgtggcttttccttaaatcacttntatgggtgtgtggcagggaagagagaaaggntgntacggagagaagcaaaggctttatagctgcttcttccctttctccttccaaggtttgtgggaaaagtggntacagtttgataatatttctgtttgtgaatgggtggagagagaagcacagggtctaagcccatgtgcttttgcttcatgccttgtcanttaggaaaatngaaggcatatgcttgtcatattgaacaaatattgattgtcaattcaagatcaattgcttgtcaattgaaagcttattttatgttcgcgcaggtcttaatagataggttttccaggtgatncagtttgcttggccttttaaagtgctgggattataaacatgagccacctcacccaccctgaaactgcttttttgtgctgagtcagttcctaggtgggggccacaagatcagatgagccagtttattgatctgggtggtgccagctaatccatcggggtctgcaaaatatctcaagcactgctcttaggagcagtttaggaagggtcagaatcttgtagcctccagctgcatgactcctaaaccataatttctaatcttgtgtctaatgttagtcctacaaaagtaatctagtccccaggcaagaaagaggtctgctttgggaaagggctgttactgtctttgtttaaactgtaaactataaactaagtttctcccaaagttagttcagcctactcccaggaatgaacaaggacagcttggaggttagaagcaaaatggagtcagttaagttaaatgtctttcactgtctcagtcataattttgcaaaggcggtttcatatcggattcagtgatgaaaagattttatctgaacaccacttaaagaggaaggcattttgtatcaataaaataatttttcaaaaaaaaatttttttttttttgagacggagtctcgctgtgtcgcccaagctggagtgtagtggcgcggtctcggcttactgcaagctccgcctcccgggttcaggccattctcctgcctcagcctccagagtagctgggactaaaggcacccgccaccgtgcccggctaattttttgtgtgtgtttttagtagagacggggtttcacccatgttagccaggatggaatttttttaaattttaaccaacattatttttaaaattttaaccaacgttaataatctaaataccctgacttgatcattacacattctatgcatgtaacaaaatattatatataccccataaatatgtacaaagatcatgtatcaattaaaaagaatctcaaatcacatgtgtattgggtcagatgttggtaaaatctgaatcccattttctgacaagatcttacacttgtgttaaagaacaaattaaagatcactagagctataaatagaatataaattgaaaagctgagtttatgtgtttgtgtatgtgcccagtaaggaaagagccccgtggctctttccctgtggggaaattcattaagtattcaccagctgggggaaattcaggggttttttcaaactgaatagaaagaggtttcataatagttatgcaaattgaagactgaagactagcagtcttcagtctttaggctgggaaagtgagttgtttaaaacaagtcctgttgtttataatcacttaccagtttcggtcaactgaatcagctgcagtgagaaaaaacattcagttttgatttgtttcctaaaaatattttccttttatactcaaaattagttgctaaccaaaattaaagaaaaaacttgagcaatacattttgttttctaaatgccactaaaattttatatgatataggagtgtgtgtatgtgtaaaaatgaaaaataaaatgtttccaaatgcgttttagtaatatcaacaaaaagatggcaaagttgtttcattcccattctctgctaccatctggtttaagaaaatacttagaaatttgttcaagtcataaaggtatcattttgagagacaggactagctggatttcctaggccaactaagaattcctaagcctagctggagaaggtgacggtacccacctttaaacacaggtcttgtaactcagctcatacacgaccaatcaggtagtaaagagggctcactaaaatacaaattaggctaacagcaggaagtaaagaaatagtcaaatcatatattgcctgagagcacagtgggagggacaatgatcgggatataaacccaggcattcgagcagggagcggcaaccccctttgagtcccctcccttgtaagggagctctgttttcattctattaaatcttgcaactgattgctcttctggtccgtgtttgttctggctggagcagagctatcgcttgcgtccaccactgcagtttgccgccgtcgcagaaccaccgctgacttctacccctccggatctggcagggtgtcccctgcgctcctgatccagcgaggcgcccattgcccctaaaggctcgctattgttcctgcacggctaagtgcccgggttcgtcctaatcaggctgaacactagtcaccaggttccacagttctcttccgtcatccacggcttccaatagagctataacactcacagcatggcccaagcttccattccttggaatccgtgaggccaagaaccccaggtcagagaacaaaaggcttgctgccatctttggagcagcccaccaccatcttgggagctctaagaacaaatattttcagataaatctttgagtaagttcacaattgggttatctgaaatatgcaaggaatcctgttcaccaagataaatccacacactccaatagaaattatcttgcaaattcaatgtcgatagttgacatggttaggcatggtgtccccatccaaatctcatcttgaattgtaatccccaagtgtttagggagagacctagtgggaggtgattagattatggggacagtttcccctatgcccattcttgtgatcatgagtgaattctcataagatctgatggttttctaagcagtagtttttcctgcactctcacacactgtctcctgccaccatgtgaagaagtcccttgcttcccctttgccttccgccatgattgtgttgtaaatttcctgaggcttccccagccacgtggaactatgggtcaattaaacctctttcctttataaattacacagtctcaggtatttctttagagcagtgtgaaaacagagtaatataatagtcaacataatttgtctttttattatctgatctccccatttttcttataaaagaatgattactttattgagaagtgggactctgcacaattaagagatgatatttcccagccttctttgtatataaaaatggcagtgtgacatagctctcgctaatgagacctaagaagaattttgctggaatttgtgggaatgggctaatttcttatttaggcatagcccttcctctcccttctactgctctcctctcaccaccgtccttcttttccttcttgttcttcatagtctttcaaaagaaaaggcaaatagaaagctgacaatggattatccaacttgttaccatacagctcccatggagatgaaagctcaccttatggagaactgagcacaaaaacctgagaatctgaaaacactgatgatactgaaatggccattgcaaaattctggctgagagcattattacagtgaaagagatctgacctaaccaacttcaccttgcttctaacctccaagccatccttgttcattcctgggcctaggccaaactaactttgggaggaacttaatttacagtttgaaacaaagacaatatctcctttccaaaacaagaccccttcctgcctggggtctagactgcctttgtaggagtaaccaattagccacacaattagaaattatggtttaggagtcatatagctggaggctgcgaagttctcaccctccccagtcgctcctggggataacatcactattgtaaaacctaagatcagtgcttcggatattttgcagaccctgcaattgatggatcagctggtaccacccacattaataaactggctcatctgggtcctgtggcccccactcagaaactgactaagtgcaagagggcagctttgattccctgtgattttatcttcgacccaagcaatcagcactcccaactcactggccccttactcaccaaattatccttaaaaaacctaatccctgaatctttggggagactgatttgagtaataataaaagtctagagggtctcccatagagtcagctgtgcatgaattaaactctctctatggcaattcccctgtcttgataaactggctctgtctaggaactgggcagagagaacccactgagcggttacaatatcgtaggtcttgttaattagctctagacagtttccctagacttcttgaaaaagcctgcatttctaactggtgaagctttggcattaaggaatgcaatctcaaattgatatactaatctaggtatttttagaaataatgtaattgtacaaatgagcaaataaacttcaagttattctaatattaaaagtgaggttaaaattgttttcactaataattacctcagtcacctttccccaccatttagaatgcaccatttgtttaatgctatagctgggattaccttaaaaatctcctggttttattgatttctagtatttaatgggtgaagaaattaatctacagaaagccatagtgactcacccagatttatgattcagacttagagtttataagtccaagaccaacattgtttcttatatgctgtgttgcctacaggggtccatagtacctgttctctaccatttattgtcaatactcagcagaactattaatacctcagggaagcaagattagtaaataatggaatatgtatcagcattgcaaacatgagctatttcatgaaggccagggtgagagcatttcatcagcttggattctcaaggtctcataaatgctttaatttgtaactgcatcaacatgtcttatggtgatgctggacatcagtgtaacacagacatagacaattaccttcaaatccaattatcggggaagccaaaggtttacctaggaaatattacctttgccaggactaggaacgtctcagtttgtttttgtgaagccttcgtgattggcacaatatgagtttaaagtatggagaaccggattcggtttctagcttgtacaattaacagctgtgtaaacaatgactcactcaagaattttgtcagcagagtattatttgtattgggttttgtttgtggggattgttttgtttgcatatatatttgtgtattttatgtggttttgaggggcatgggggttctgctcatctctgtgtgtctacccaggtctctagtagtcactttagcccagatagattctttagccattaactaaatattggcttcctagtttttcactacacatacaataacgtacggtaatcagatgtgtgactttgccatgtgtacatacttccagaactgccagttcaaaataaacagaccctccttgacatggagaatccacataatgtcacaggaatgactcacataccttccaggaagatatgtgagtaaaagaagctcttctatgctgtggatagtgagcagagctataaagaattaaggctatagaacctataatttaataagatttttttttctgagttttccctggtggaataaacaaagggaaaatgcatttttgtctaccttgggagggaaagtaacatgattgtgaagtctcttagatttaatgcagctttgtttgatttctagatatttctaagagtttgttaacatttgtaataataggcaccagaaacttctatgggaaaaaagggaaaacgtgaacaaaaaaaggaactatggcattttcactgaggaagtaaagcgtgatctggagaaataaaaaacagacaaacacatattggtcccaggccagttttaagaaacccttttatactaagccctttttaacagaaagtgttaatagtattcaatttttttaaaaaaagaaggagaactcataaaattcacttagctctcctaattacggcaaattattggaacaaattgttttgttaaattcaatcagtcttaggtcttagagacgctacaaatgggattatcttatggacaaatgtgacagaaatgggatgggaacttgaagaatataatgatttctgaggatcaggaaagtggaattaagtccttctgatttcgagaaattactgggcaatagtgcagatcagctgctgttgggagatagaaatcattgcaattttaataggctaagatcagtggtagtgcaaaggagggcataggatgaagcaaactttatagatataaaatgcaaacctataaaatggccaggatgtcatattggagataaagacacctttgggagactgtactagagaggattagcaaggcacctgttgtggttacacacaatcccagtgtcttctaaaccccagtttaaaagacagttatctgacctctctccaagtttattacagactaaagaatcacagttgcctgtaaatatgtctatgtttgaggaattgaatgactatcactaagagatgggattcgaatttattggagcttccaagagtctttacaagaatggcaagaatgttgcaggggcccagggccgggcacggtggctcatgcctgtaatccagcactttgggaggctgaggcggacgtatcacgaggtcaagagatcgagaccattctggccaacatggtgaaaccccgtctctaccaaaaatacaaaaaattagctgagcgtagtggcatgcacctgtagtcccagttcaggaggctggagcaggagaatcacttgaactcgggaggcagaggttgcagtgagtcgaggagccaagatcataccactgcactccagcctggcgacagagtgagactccgtctcaaaaaaaaaaaaaaaaaaaaaaaaaagaacattgcaggggccaagggtatagcttcccttttgccctctgaagtttcgctgaaaagtcaacttgtaaaagtcagattaattgagaaaaggcatacaaattattcaacacatagacatgagggccttcagaatgaagacccaaaaaatataggggaaagtatccatttgtatgcttaggttcaacgaagtaaggacagccctgtagaaatatgactggatataatctatgctaataggcttagttagaaccgagcaagacccgtctgtctaggtttttcttggcctctctgtgctgcattccttcattttggttgtaggacaggaccatctctggaatgggcatcttatgacctacagtcaaacaagatagctcagatgatttctttatgaccagttttacacagatagagtggaaggagagttagagtaacacttttaggttttaaggctggctgtggcaagaggggtgtctggtttctatgacccaccttggggagggattcttgtttgtacagctagcctcaaaggaagataggactgagagacaggaaaggaagtcagagaaaaacttttgcttctgaggtattgttttggggtattgttttctgagcccctaaatacataataggtatctttgtctttgccctttttattgttcttttcctccttttttctcttatgtgccactgtcaccattctcaggtgggctttcgagaatgaatgtgcaaaattcatgattagggtcaaccacatctccatagctatgggccttacaagcattaactgtctatcatttgcatcttcagactgatattcagaacagtttcaggattctcacactagcctagagaacaattttttaaataattccatcaacatattgatatgggagaggggcagggaagtgctaagtagagaagggcagggtccctggcgaggttccaccctcggcctttgcccacaaacccaggtgaggacaggcactcctgttttcatgccaaatgttgcatttccaagccagccatgcccctcctcctgtgcctataaaaaccctgataccctagtgggtatacacacacaagtggctggatgtcaagaggaacacactggcagaagaacacaccaacagttgctggcagaccatcgatggcagaacaaagcagataccaaaggaaattcagctgagggtggttggaggagagccaggctgctgagcagccctactccagagaagaccaccttcccactccatccccgttctggctccctgtccatctgttgataactactatcaccactcaataaaaccttgcactcactctccaagcccacatatgatctgatttttctgggacacttgggcaagaaccctgggatacagaaagccctctgtccttgcgataaggtagagggtctaactgagctcattaaagcaaggtgcctgcggacggctaagctgaaagagcacattgtaacatacacccatttgggcttcgggagctgtaaacactcaaccctagatgctgccatggagtcggagcccacgctccccatgacctgcccgtctgcatgcttcccttaggggtttgagctgcggggcaccaaagaagtgagccacacccccatcacgcaccctgcaagggggataagggaaaactcccctcgtttcaatatgttaaagcttattcaccccatgagagccatttggttggtaggctattaattattgcctcaatttcagagcctgttattggtctattcagggattcaacttcttcctggtttagtcttgggagggtgcatgtgtccaggaatttatccatttcttctagattttctagtttatttgtgtagaggtgtttatagtattttctgatggtagtttgtatttctgtgggattggtggtgatattccctttatcattttttattgcttctatttgattcttctctcttttcttctttattagtcttgctagcagtctatcaattttgttgatcttttcagaaaaccagctcctggattcattaattttttgaagagttttttgtgtctctatctccttcagttctgctctgatcttagttatttcttgccttctgctagcttttgaatgtgtttgctcttgcttctctagttcttttaattgtgatgttagggtgtcaattttagatctttcctgctttctcttgtgggtatttagtgctataaatttccctctacacactgctttaaatgtgtcccagagattctggtatgttgtgtctttgttctcgttggtttcaaagaacatctttatttctgccttcatttctttatgtacgcagtagtcattcaggagcaggttgttcagtttccatgtagttgagtggttttgagtcagtttcttaatcctgagtaaaatgctattcttaacatcagttctgttccattggtctattcaccttgttactaggcttattactaggactatgtagtatgcttcctcactgttctatttgaacattctaggagaatgaaaacaccatagaggaaggtggttttttctgttctgtccattgatgcaatccaagcacctagaacacagcctggcacagaagaagcactcaaactgtggtatttcaatgaaaagtgaggaatatttttcatgtggaattttttaaaggaatgttgtgccctacaccttttcagtaaggagattttctgtgaagtactacgcgaggcctgctgtgtgcatggcgagatcagcagaggcagagaccaagagaggcagaaacctggcagagctgctgaggatggtgtagaaagagactcccccatgcttagtcatcccatcatgcccattgtcatgtgtagcctccagttatacaaagctagagatgctcagcctcatccccatttgagataattgcattcttttgccctattcatcatcactgaatggtgagtcccagcaattctgatatcaagagcaccaggaaataaccatttgtttgtatttcacttggaaggtagggtctcacaccaggtttggggatttactgttcaagtccagatgaccagtaaagcaagttcctggaagtaataatatagcagttaagagcacagtcccagccaggcacagtggctcacgcctgtaatcccagcactttgggaggctgaggcgagcagatcacgaggtcaggagtcgagaccatcctggctaacacagtgaaaccccgtctctactaaaaatataaaaaattaaacaggcgttgtggcgggcgcctgtagtcccggctacttgggaggctgaggcaggaggatggcgtgaccccgggaggcggagcttgcagtgagcagagatcccgccactgcaccccagcctgagtaacagagcaagactccgtcaaaaaaaaaaaaaaaaaaaacgatcacagagcacagtccctgaattaagattacctggattcaaatctagacttcattactttctagggtgtgtgacagggtaagttacttaacctctctgtaatttaggttatcagccaaaagacagaaaccttctgttattttagcagagaatacttgctagaaagagtcattacctgtgtattaaagaactgcaaaggcataaagaaaacactgaaataatacagacatagaaactgcatgaatcagccacagcccagtcactactaactccctaagcaatccctggcctttagtttccccacctgtaaaatgctgaagttggggggaaaaatcgtttcactttcattccggtggcgtgatacgagattctaagaaacagggagaaaattccgtgagtggagccaataaccaagtcaaacatcaggggggtctatgaacactgctccaaggaatctctctctggataaccagaccttgtgccctagccccagcccgtcatctccactgctagagaaaaaaaatacagttagtctgtccaaggctgttagagtcctccaacatataagacgcatttccattttactagcttcatggtctgcttggggtggggatggcggggagatcgtatccttgaagtaggcactaggactgtgagtcacttgcctgtctagagcaccaggactgtttgcaaagggctgaggagatttccatcaatggaaaagagcatgaatttagagtaaacatagattacacttagagatcagagatcaatctagagataaaatacacttttctctaaagggggtgggagaagatgttggacaagaaataccagattttcttaatggttcatttatgtcaggctctatggtggggacttttatgttatttgacttaatcctcacaacaattctgaaaaatcttttttcaaattttatgagaaagtgaactggatatttaactgattttctcacgaattccttctgaggctcagaagtgtgaaagaagcccaaatgaccaaggttctttaacaatttggtcaaaacaggtcatagacccagaggaaggtctggatcctggaagttttcttaagcaaagacagtgcttgttgtggatatgaagatgttgactaagctgggcacagtggctcacacctgtaatcccagctttgggaggccaaggcaggtggatcacctgagatcaggagttcnagaccagcctgaccaacatgggtgaatcctgtctctagtnaaaatacaaaaaatagacaggcatggtggtgggcacccatagtcccagctactggggaggctgaggcaggagaatcacttgaacctgggaggtggaggttacagtgagctgagactgcaccattgcactccagcctgagcaacaagagcaaaaaactccatctcaaaaaaaaaaaaagatgttgaccaaatggcagactcttgccatgaagcaagcccagacctcagtgccaagagatgtgaattagattcctgcctcttccacagactagacatgtgactgggggcagattccttcagcaatatcacctcatttggagaagaactggactaaaataccctccaagtagtttatgagttatttaaatctcccaggcttaggtttgctcctctcttaggggatagccttgccacccttcaggaaatggagactgtatatggagcatgttgtgccgccagctgctgcatgtcccagagccatcttaaaccctacccttctgaacaatggctagtctacaagaagccttaaaagggatgtgaaagtggcaacagtgtcccctcaacaacaaatacttccccaaatatgagcttgtgtggagcctgatgactctgcctctgaggccaatccactggcatctttcccaagatgtgcctggacttccctgagcatgaggccaaagatggagaatggaaacacccaaaagaagtaacaaggagacacggaattttccacaggttgctttcagcttaccaagagcctggaaagtgagagaatagattctccaaaattcaaaactaacattactattatcaatatttattgtctactttttgtaaactctttgcatcttttttctttaattctcccaacacccacagagtggaattattattatccatccaccatttatttaatagacaagaaaactcaggctaagcaaaactagatgacttaaataattctatgtaggagtagggaaaatgaattttaactgggaccgtacaaatcactagtctgcacaaaggtctttttctcatgtgtcacttctatcttgtgtcattttgccagacctcagaatttagaaagaggaagcagaggcactttttatatatcaactgtctgtaactacagcaaaattcacatcctgtgtaatcataaatactgctctaagaaagggacaggaagtctcagaggctggagagcagagcaccaagattgttctggcaaggaacagccagtgggaggttccagctgagcgctccccagaggtgagctgatccccagccacagcacacaggaccaggctgcgagaacaggtagacaccttggtttagatcatgacttttggggaagattgtgtgcttttgaaaagacagccagggaattggattatcatcctgtctctgattctgaccacctgtgtgagttggagcgtcagctcagtcccctttttgggtctcagtttactcacttgtcaaataagaaaattgggtaaaaccattcttaggtttccctcattgaggtgattttcctcaatgttctgcattctcctggtgtgtcactcagtcttacagagtctactctcaacaaatactgtgcaattagactgaatcttgcattagaaccccatggtcctactctaattctgtaatacagaaaattgctgggcagagctgttgacctccatgtcatgatttatcttcaaagcacggattttagagctgtcttgaaagctgtgggtccctccagtctatctcctcaaggcgaatgtggaaggacaaagcatcctctcagactgtggtgtttggagatgatagcatcagtctggagacttttgtgaaacataaagaatcttggttatataggattccttctaaaagtagcaacgtgtatctaaattcaagtgtcatagatttaaatgtaataattccacttccatacatcactgtgagataattaaatgcaggaggtatcacaaaagtgcaaagatgttcattattgcattgttcatagtggcaaaaagaaaaaatagaaaccacctaaatagtcatgaacatgtgattgattaaatgaatctagagacctccatttatttaaatataccatttggctttttggttgtagtaaaatatgcttaaaataattgtagccttttaaccatgtgtttttttgttgttttttgtttgtttgtttgtttgttttttaattgagaaagagttttgctcagtcacccaggctagagtgcgtgatctcggcttactgcaaccactgtcttccaggttcaagcgattctcccatctcagcctcctgagtagctgggattacaggcactcaccatcatgcctggctaatttttgtatttttttagtagagacggggtttcaccatgttggccacgctggtcttgaattcctgacctcaggtgatctgcccgcctcggcctcccaaagtgctaggattacaggcatgagccgctgcacccagccttaaccatttttaggtgtacagttcagtggcattaagcacattcacaccattgtgcaaccatcaccaccacccaactccagaactttcttgtcttcccaaactggaactccgtgcccattaaacaatagctttccattcccctctcccgccagcccctggcaaccaccattctactttcagtgaatttgactcttctaggtgcctcacataagtagaatcatacaatatttgtccttttgtgactggattatttcacttgccatattgtcttcaaggttcatccatgttgtgccatgtatcagaatctatcatttgcttttaaatttaggctttttattatttctattcatcggtcaaagatgtctacagaataatgttgagtacaaaaagaacagttataaaatggcatggatagaatgactatttccgtagaattgtgaatgtctgtgaacatatataaagaggagagagataaagtgacagatgggaagagagaatgtaaagaatatgtgcataggaaacaagagtgatcgggtggcagttgaaagttaaggagctaatttgttttcttcttcaaactgtattcccttgtaatggtggtactttatgcactctttcaaacagaacaaacagttaagaaataacaaaggaaaataaatgttcatggtatcagataggctatagcctgaaagtatcaattaaactttcgagtcctagcttcaggctgagaatcaagcattttctgcagtccttaggtatgagattcgaaaaataaagaaaggaacccagaactcaggaggctggtgacgaagactagtaggaaggagtctagttggtatatttgggctattgagccacacagagcaaggtaaaagccaagtttctacaacatgaaagcaagttgggaaaaagaaatcttcaacctatattccctaagatcagcaatgtccctgggagaggatatggaactgatgagtggcagccaatgcttcaacaataggggaggaagaatagagaggatgagaatcagttgtagctagccgggcaagaacaaacctacagggatatagaagagctctggtgttagatggcctgtgcccaaatcttgcctccactacctgctagataagcaatcttgcacaagctatttcacctctccaagcctcatttttcttatcttcaaagttcagcacccatctctgagactgcagattaaatgagactgtcacaaagctcttaatagaatgccacattcatagtacgtgcccaatcaatgttagcaatgattatcattttatcatgaactactgtttgattctggaacctagaatttctctaagcctgacactttttctccttctctggctttaaagatgtgctggaaggctcaccctgactccactgcagggattcagcttcaacattattcccctcataggacatgtaacctcacccacacttctacccagatttcaaaattccaagaaatgaaaactatctccttaaacaaagagaactttaggtttaataattcttcagataaagtatctcatgcccggagagcatgagaaactagactaaggcacagatctaggagtagaaataaaatggaggtccaaacatggatcgactattatggaacacctgataaaactcagagagttacaacaaaagacactcacgtgtgtcattcaaatcctcacaagagtccttcaggatagtgtcattatccttattttacagataaggaaactggggatgaatgagggaaagtatcctgcctacggccagctcatcaatatcagaactgggcttccaatgaatattagataaaactgatatgttttgggagtttatcacatgcctccccctatgctgagtccattatatgtgtcatcttatccaacctgtaccacaaacctatgaagtggtgaaaataccttgcccagggtgagtttagcagtaactggtggatatgggatctgaacacacgactggactccaagacatatggtcagatgtgcaactagatgcctaggcattggactcccatcccagtgcacttttccatctccctcactaggaagagattctaggtgtcatttccaatttttacatgttcttcactccacccaagagaggccagaaccattcctaaagcaccaacacattgaggcaaaatgtcaggcagcagagctgtggcacctttcaaggatgacaagcctttaactaaactctggccttcagtagggagaatgttgagctgaaaacaaatctgggcaacatttcaggtgctgagccttgttgctgacaccacagaggcccagcaatgctgctgagttagtggtggcagacaacttgctcctggaatctacaagggaactggaaatgttaggaaggaagaaaggaaggaagaggaagaggaggagaattaacatggcatagagaaaaaaatatcacaagcgtctgagccagacaagtctcaatccagtcatgtaaacacaggctgttaatatttgctaccatatattgaacacattctaagtgccaggctaagtactttatgtgactatttcattcaataaaagtcacttgagcttattagccccaggtttctaatgtataaaattgatttaataacatgtaagttacagggttgttataaggattagagctgcaatggtctaatgcttggaattcagcaggagttaagtaaatgtttacattactaattacgaagccaatataagcaaggaggaagattccggatgggacaggccatctcgctataggaaaggaaagtggaacagcattcatcctcaacatttttacgaagacaaaatgaagactggagtagaagactgatcagtgcaggtgtagcataaaagtgtaatcctggaagatgtggtgtgagaaggtagcacaagtgaagcagagatacaggagatagggaagggaagctggaagcagaggtcactggagggagagggagatggacacattcagggctacaaagcaagttctatgtgatttgctcacctctcaattgtgggacccctcaaaatgtgtacagtactctcccagtgacatgcttcttgaccacaatggatgaactgtgcccagcatgcccactttccaatgctccactgatccccatgttttgtttctgaaggacaaccagccttggaataatggcaaataccttcttaagttcctacaaagtatggtccctgggaagtttatgtctgtaagtcaaaccttgggaagtaactgagttttgatgcctcttccagcatcatcagcatcatgctattacaatcccaaaccatgggggtttctcacagctttacaccaaagggcatcactatccctcaaagagagaaacctggacacatgtaccaaaacgaagattacctgcagaacgggctgccaacagaaaccaccgttcttggggtaagtccacctcattataaggggaatactgagaaaatactttgtaaatgtatctagactacagatctacagtgggtctgggaaactctttcactcttttctggctgactccaggctaatgaggacatgaaatggagctttaagggaagactcttaaagctctgcagcagtttctagaaactaaaaccactagatctttttcactagcatgcttcacaattaacaggttagtctttcttattttatttatttatatatttatttattttgagacagaatctccctctgtcacccagcatggagtgcagtggcacgatctcagctcactgcaacctccgcctcctgggttcaagtgattcttctgcctcagcctcccgagtagctgggactatgggtgcacgccaccacgcccggctaatttttgtattcttagtagagatggggtttcaccatactggccaggctggtcttgaactcctgaccttgtgatctgcccgccttggcctcccaaagtgctgggattacaggcatgagccactgtgcccagccacaaattagtctttcttattttgtcattagtacagtaaaaattttctatttaaccatatggattttactcaatatgattaaattaactttgagcttatttttcaaatattttgagatgagacgatcaagactaatctcatgacccatttttccccgttcatatgagtaactataagacatccaagtgtcccagatcatcatccctcatatccagaactttaatctccatgtggttttgaataccctcttataatacccaggtcctattcactgcctatttagatggatctccctgccctgtttctttacaatctattcttagtacagcaggtagggtactcttttaaaaatgaaagttagatcatgtattctcctggctcaaaattatccagtgggattccttttttgctcaaaatgaaaagcaaagttggtaaaacatagcctaaaaatccctacatagtttgtaccatgcctccagtacttcacaagcctcatgtcctactactttgctcttaactctattctgccttgcatggaacttgtctgtacctttacagacaagacatagtacacatataagctctccaatggtagtgattttcatttgcttcattccctcgtgcctggcacacaacatacctgttgtggtattcaataactgttgatgatgtgaatggttgacttctttttttatttctcctatgtttgcatcatctttcaattgcacatgcattaaactatgagcaaaagcatgggctttagagcaagctaacagctaaacttcagttcttccacttgcgaaataattattattaaaatccaatgatgaacaaaataagatgaattacagcagaagagatgacctgctctatctaatttcaactgaaaaatctcttcattaacactcctgtgaaaagtttgctctctatttccacctcactggacaacttttttatctacttttcaagaaaataaatttaaaaactgtcaagtatctttttcaaaaaaagttaaaatgtgtgtatgatcactttccgatttgctggtttaataatcctatcagaaaagaagaggttagctatacatgactttctctagaagcatatcgattggctccttgtaacatttttcctctttaatataacaaattataatgtattttatactctttatactttaccgtgtgcattcaaataatcacttttatctgtttgaagtgcagtctagatttcctgtcttctctcttgtagactgtccagatcctgtgttgcctgttgatttcaagtctgggggccatcttggtttttgctccctacccctcccacttcaatccagcaatttccaccactttgatgtctgggtacccatttttaggagctctgtgtgtgagtagaatggggactctaagaggggacatgctttataaatgctaaccaggtgcatagtcgtggagtgactcagactccaagaggccaggaggcaaaaggcggcaaggcctcgactttccttctatcattgccccacgtcacatttcccctattcaagaagagcagcagagagacttaatctgtcttcctgcagagcagggggcaagagggaatggtaatacaatgggtataccagcacagaatttcttacctggcattacagcatacctctagaaaagtggatgattttccatatccctctttgaggctttgatgaggccattggattccctccattgtaagaataatcaacttttcaggtagagagtgagaaggccatttttaaacaataaaacgagcaccactggttgatgccacaggtttgcagagatttggattaacaagggtaagattcatgggaggcagggacatgcttgctgtgtgtccagaggtaaccctgagcactagagaaactctctttgctgccttccacctaatggctcatgaaaaagggcccagtagatccatttttcagagagtggccagggcagactcacacttcccacaaagggttatttcttctccacgtagtatttggtacaaaggataaaaatcaaatattctgggcaaatgaactatactaaggtaccacttctgtgtggatacagtccctgtgtgaacacaaactgtgcagtcacataaggaggccctggtcctgccccagagcacaatttgtccttgacttctcctgtaaccagtggttgtgggccccacatctccttagagaagctagcgttagctcatactggaccctctttgcctgtgattattcaatatccaagccacacacttaagcaacttttcagcttctcagaatacccttcctctgccagctggatctttaataccactgagattaaatactgatttctggggctttatgataaagacttcacgtctgagcctgctcttcccactttcctcgactcccattctgactcaagcaacatacaccaataacttccagtccatgtgtttctgcaccttgtcccatcagagcctctttcctgagtgcttctgttggctgttccaatctctctgtccattcaagtcattggtccatctcaacctcctctctttcaaccctgtaatttagtaacactcttctccttcccaggtacaccttttctccaggcctcctcagttcctagtgatttccactaaaacaaatccaacccctctgtgcatctgcatgtcattcaaagtcaatatagacattcttatatcaggtgggaattaggcctatctagcaatatagatccacaagatttctgcagtgttctctccctaaaagttttccaacatcactttttgattgagtgattgacagtgacatggtgggcacatttccacaagacaactgaactgatcatttctctctcttctgggcagtttggcattactggatccctctcaattatctctggaaaacaatcaactaagccctttgtaagtataaggaccatcaaatctcagctggttggaattgaaggaacgtcagagttaattcttctagtttaaaaatccctattttacaatttagagagaaaaagcttagaacaggctaggaagcccaggttttcctggctgtcccattggtagaaccaagagtagagcccaaatttcttgccttctagaccagtgctctttcgtctacacaatgttgctcctggattatattccaagcttggaggaggtttacctcagttatttaaaaagtgtacatttttaaatgtaccatggactctttatagcttgtaaccttgaccttgaataaggtagccacccatcccagagagagcctacagatccttttttctataaaacctgcctcttggggttctttttgatgccaaatgtccccattcatagagttgggacttcacacaaattctagcccttcagcgtcagggtgaccaattgtttggttttcccaggactgtctcagttttagcccagaaagcctatatcctgggaaaccccttactccccaggcaaagcagaataactggtttaccctactctgtgaccgtggtaacaagttgaaagaagtccatgatatattttcaaagttctactatttaagcaactgaaataaacttctttcagtcaaatatcaggtggggaggcattcattcccctgtcagaagagggtgttgccgtcttcatccaggctggaggagactatttccatccaaagactcatgcttgataattggatgtttgagaaaaaaaatcagtttaaagtaaggtgggagaaaatgagggtgatggagtaggggtgagggggatgtctgcaatgtcagcactgattgcagcaccaaactcaaagacaataccactcatgccactgccaacatacccctggcttcctcaacaactttagaattattatattgccctaagtgcatctagaatatgacctttggtccctccctagaaacccaatgtatgtcttcttacttaaaagagcggcttcagagaaaagacaaaagcaaactgaagaagttggaatacctacctacaggtggatcaggcctatgagaaccacattcaccacaccatttcccaactcctcttctacattttaggagacaggattctcccatagcatgacgattcactagcaaagacactgatgtgccaggctctgtgcgaggtttccagcacatgctcctctctgtttaagcatcactggaagacaatgtatgttgggaaggatggttgtcctgcccttttctactccagctctgtagctatatggattcatgtgctgagtctttgaaggaaaagtagtcccagtgggcagtatctttgcccaaagctaccatatgagcaatggagcccacatgttgttctttgtcccacttgtggagcccacattgttgtcaagtccaagcatagatttccctttctgtgtattcagtgcatttgggaagccacttctgagatcagaagattcatcttccacattttataaaagagataactgaagcccagagtaagaaggacttgctcaagcacacagatggatcagtgacagatgggtcagtgacagagctgggataggaggagaggatttcagtttctaagtccagaactatgactccaaccaatgaatgctgtgaactcttcaaaaccctcttccataatcctgggttctagactgcagcttcaatcatcaggagcatataccagcctcatgcaccatccatgtgtcctcatctgtgcctagccaggccctgtatcttcttgagtcaggatgtggcttttccctaaatcacctctatgggtgtgtggcagggaagagagaaaggctgctacggagagaagcaaaggctttatagctgcttcctccctttctccctccaaggtttgtgggaaaagtggctacagtctgataatatttctgtttgtgaatgggtggagagagaagcacagggtctaagcccatgtgcctctgcctcatgccctgtcacttaggaaaatcgaaggcatatgcttgtcatattgaacaaatattgattgtcaattcaagatcaattgcttgtcaattgaaagcctattttatgttcccacagacctatagataggttttccaacttttccagtttgcctccaccttttctctgaagctgctcttttatgtaaatcaaagtcatggattcagtttaccagaggggaccgaagtccatattctagaagccctgaaggcaacagaatgattctaaggctattgaggaagtcatgggagatgttggcagtgacctgagcagcactgtctctatcttgagtgctatagagagtcaatgggccagaacccctctccctaaggaggaattatccatgcattttcttattcaataagcatttactaattatatcacatgattaactaaatagcgacaagagatacaaagatgaataaaacacagtttgtgcccacacaaggaaacaggaaggaaacagacccaaggaagcaccattgcagtacaatggacagaggactaatagtgtcacgtgctgattctgtgatgagaacccaatgcagagtttctcttccaggacctgagcagcttgacctcaaatgcagtgagttctgttactgcaggagcaggcctcttcctccttgctgacagcatggtagccctgaggactgcctctcaacattgtggctcagaaatggattatctatcctcattgccttattcggagtactattatccaatatatgaaatcaaagattgtctcctgaccagtgtcagtttaacagtgagtagtttcagactgaatatcctgtcatgtgaaatctctgtgtctcccctttgcatactctctgcttttctggcagtctctggttggtcggtccgaatgcctggagacagacagaaataaacaaaaacttgtggttggaagaggcctgtctgctgactgcatggtgtgggggatgtactatagaaagtcaaaagaggaaatcatgaaggacagtagggagtctatcccctccactggtctttcttaatcacaaacgttccaaccttaatgggtttaactcttaaagtacaacctttgttgtactcatcacaggcagaaatattcttcctactcatcacaggcagaaatattcttcatttgaattatattttaatttgggattcttttgggttcttttccaggggttggatgcccctaccccttaaagatgcttgtcttctgatcatcagtgaattgaggactagcagaggctgtacggtgtttaagttaatcttcaaatgcaagcctgtatgctacattatgttaggcacaaaacttgaaccttaagtccaaatacatagttattttgtactttggtctaacagggctgacagagagtggtgggaagggagacaacggatttgacttctagaaaaaatgtcaacctctctgggcagcattttcttggcacctttctcccaaacttgatgatcactacctgttcgtggtgacaagccttgcttattcaatcctataaatatagtatcatggtgttaaaaccataaaccagtggccttttaagaagaaagacttcttcctctatgaatcctcctagtaggagcacagggaacccaaggtagtatctctcattcccttggatccatctatctcacaaatctcagaaaatgtgtgcaagcttttgcactcctgtgggtctgctcatgtgacccagagattgtcaaaagcaacccctttggttcaggagcttgaggaagtggaagagcacagagacctgtctggaggaaacccagtagatagtgtcatcctggtgtaggacagacatgtggtaaagcaatgggggtgggagaggcatattgggggtttaatttaaagaaaatgaatttcattaccccaaactgcttcccattctgagacaactggagtccaaaagaacttcctacaatatgagagaagttgcaacatagcagactaagcagactccaaaggcctactctttgttaattaacacagcaattacctgaacaaaagtaatgaaattttaaaaattaaaaaatatatagccaaagttggaagaagaaaggaagggagggcagaaggaaaaacaaatctaagaagaaagatgacttaggttccagaagctaagaaggatcctaaagccaaatcatcaaacaagagctgaggccaaaataccaaggaagtctgaataggaatattggtattagaggctaggatcacacagttttaacatccatgacaagatttggcattggacagggccataaagctcatatggagtaccctgcaaaaatgttgaaagctgatactgaatatttactcaatttgtgaaaataatataaggaaaattctgcccaacatcccaagaagtttcaagaaaaccttccgtcagctcactaagctttgtgcaagtgtgccatctgaattcataattacatataaaatagggggacctcaaataaaagcattaagttaaaaactgttacgagatatgtgaaacttctaaggttctagcagaatcaaatctaaaactactatctaaggagatgtccgtaaacccaacttataagatgcctccctatcaaagaaccctaccactaccaccatctacaaactgaagttatctaataaccaaaatattatgagaaacataacaacagcacaaaaaaatgagtagcggcagcaaatggggaaacatgaaagtcagaagctcaagaattggagataacataataatttgaacaaggctattatgaaaatacattttaaatcattaaagatgtttaaaaagtaatagaaaccaggccaggtgcagtggctcacaactgtaattccagcacattgggaggctgaggcgggtggatcacccgaggccaggagtttgagaccagcctggccaacatggtgaaatgctgtctctactaaaaatacaaaaattagtcagggagggtggtacatgcctgtaatcctagctacttgggaggctgaggcaggggaatcacttgaactcgggaggcagaggttgcagtgagctgagatcacaccattgcactccagactgggtgacagaatgagaccctgtctaaaaaaaaaaaaaaaagtaatagaaaccaaaatggaaaaaaaaaaaaaggacagtaaaggaaaaaaaagatatgtgcatttgagaaaaaaatgaaatcacatacttggaaatgaaaattgtctttgaaattaaaaactgagcagatcagttaaacagcagattcaatatattcaaggaaacaaagagtgaaatggaatttagatttgattaaatcacacagaacacaacacattatgtgtgtttggaaaagatggatgaaagcctaaaaggtatgatggatgcagggaagtggagaggttcagtacatatctagtaggagtcccagtgagagattataaaagagagagtatatgcaaaagtaaataactagaaattttttagaatttaataaaaacatgagatttcagattgaaggaatgcattgagaccactgcaggatacacagaatcaaatacacacctagaaatatcatcatgacaataaaaacaccatagtcaaaaagaaaataataaaagcaaccagagataagtggcagattactctcatctatcattaggtgggataccaaagttctgagatgatgccgttgctgcttatttcccttcatctattaagaaatctgaaaaagaaagcagaaaagaggattaagcaattttccctgtctccttttctctgcattgctggagcctcatcgccctgtctcctcttagccaggcacaagggctagcttgtcttgggtaccagccattcatgtcctgatttgcagggtgtcctagtggtgatgctcatcttcactgtgctggagctcttattagctgcatacagttctgtcttttggtggaaacagctctactccaacaaccctggggtgagtatgctgacatgtcgcctgatacctgctgtgtctcaggtccaggctacaataatccaacctcaaaaagtggcaaaaagaagaatcaattattgttcatgaggtgcatgtggaaggccacttttataattaaaaaaatgagtttaacagtgaaaccccatctctactaaaaatatgaaaaactagccaggtgcagtggcacacgcctgtagtcccagctagttgggaggctgaggcaggagaattgcttgaacccaggaagtggaggttgcagtgagctgagatcacaccactgcactgcagcctgggtgacagagtgagactcagtctcaaaaaaaaaaaagagtttgtataaatgggctccttctggaggacactctggtcatctgggatcagctggtgtctactgggaagcagaccagttagagaattgcttaatatgaagctagttggttttagaaatcacatagcccaacccctcatgaaagaaccacggcttggataaaattacatagaaaatgaatgacacagactattgggctgagaatgagaacgcgtatcccctcacttttatcgggaacacagctacctgcctcccgagagagtctccctagccaagtttccttgttaatgtgatgagactttactagaatgtctctgtcctgtttatgcttccctgtgctcttccttacatccccttagctcttgatgttataattttaaaatattttcatttcccctaaaggctacaacaacaaaagaaatgtttatagaatttggatgaattatgatttaactatgatcctatttaaaatagtaaaataattagcagactggagaattgcattatttttaattaatattgctgcaattacatattatggcaaagttggaagaactagtactacacaaaacttggggaaaaggtattatgagttatcttttttaatctccgaaatcaaagtttaaaaattctaaccaattatgtattttctagagttcattttcctcgacccagtcacaagatcatatccaacaggtcaaaaagagttcttcacggtcttggatataagtaactcttggcctcagaggaaggaaaagcaactcaacactcatggtcaagtgtgattagactttcctgaaatctctgccattttagatactgtgaaacaaactaaaaaaaaaaaagcttttgttttgtatttgtttactatgagtcgttatttaatttctcttgaaaataatttcctcaaagcccaagtcaataaatgttatcagccagtcttccaaaatggtcataaactttataaactgctttgggtaaactgagcagaaggtgatacacagaagggaaaatgtgcactcatgctagtgtgaatttggtaagtcgcgtgactctgcaggctgtttctgtattattttcacactcatattgcttaaatattacatattagggattgtaagaaaactttaattaaaaattaaagactatatataattaaactactctgccctggacactctctgagaaacagatctactgggccctttttcatgagccattaggtggaagacagcaaagagatcttctcaagtgcttaggattacctctcaacacacagcaagcatgtccctgcctcccatgaatcttaccatgtaaatccaaatctctgcaatcctgtggcaccaaccagtggtgctcattctattgtttaaaaatggccttcttggctgggcgcggtggctcactcctgtaatcccagcactttggtaggccgaggtggacggatcacccgaggtcaggagtttgagaccagcctggccaacaaggtgaaaccctgtctctactaaaaatacaaaaaattagccaggcatggtggtgcgcacctgtagttccagctacttgggaggctgaggcagaagaatcacttgaacccgggaaggggaggttgcagtgagcggagactgcaccactgcattccagcccggcctacaagaacaaaactccatctcaaaataaataaaaaaataaataaaaataaaaatagactatatatagtctttgaattcatttattttaaataaatgaataaaataaaataaaaaagaatattcagtcgttggcacataaactatgttctcttctgtcatttcagggtaggagtcaatgaagacatcttagtcttaacaagttacagataatctctgactggcatgttttctgcttctagcttggagctaaatgctgctcatgctgaaaagaataatgtctatttctttgtttgggtattagctctattttgatctatagcacagttttgtaattcagatcatcacccctgcactttgtaccacatgggcgtattctttcttcccagtcattgctgcaattatcttgtctgttctttgtgtaatatgttctgtgtgagcctctgcattaaactcgatttcttgggcaattatggaaattccagtgtggctgcagtttaactttgcactctctatgcatatgaggtttcctaaataaatgaggagtagcatagtttaaaatatatatatcttataactttctacaacaaagaattattgagtccaaatgtcatcagtgctcattttgagataccctgctatcgatggtcgctacaaaccaggaaatactcaagttattatgtgtatacattggttttagttttatgaaacaatttaccttcatgatctcatagttaaaattgtaataaatttaggaatataaaggatcaatatgggaagcaaaatttctaaaggcagtttctgttgttttaattagtatttgtgtagttcaaaccaggaaggatttgactatcattagattttgcttaactttatgaaagctaaaatattctctgttataaaggggcaactccatctggtcctatagcatctttactactgatttttttttgtttaatttgaaaatgcaaagaattgttaaatgttcttaaatgttctcactacaaaaaaagaaaaaagataactacgtgaggtgatggatatgttaattagctggattgtggtaatcattttggaatgtatatgtatatcaaaacatgtagtacaccctaaatatatataatttttatttgtcaaatatacctcaataaagatggaaaaaaatcgaaattcaaagttatctactgatttttataatacagagaaatatggttaaacagtaagttagaaaattcatcaagtaaaagaaactcctttcaaaggagggcagaagcgtggctgagtttaaaaaacatagattttggagacaggtcaagttgagtttgccccttccctgtcctgtatgtctttgggtgacataaccttgctgttcctcagtttcagtattgtagaactgttaaaagaataaatgttagtgcatgtcaacaccttctacacagttcccagaacataaggaatattccataagttttagttcctttataactcatgaacatatgtgtaaggacttgtttcgtatataccatctattctttgtttaccatatgtttgtaagcaaattgacaagagagtaagtcttctggatacagtacttttcaccaggaagatggggggctgagcatgctctagaattctaaaactctgtgactcaactatgattctgagattctactactgagtagagtcatcactaagggctcatctctgagggctccatgtgactctggtggagaggtagatcatgatttgggcggcaatgtttgctcactctttcccttactagagttctgccatagaatcatggagtcaacatcccaggacagaagggcaactcacgtcatcactataaaaccaaacgaaactgtattgactgcatttccctacagacctcatagctctctgctggattttctgaagggagagccaagagtcttgggggtaagtcctctccagtcaataggtcttccagaaggggagaaaagaagtttatttattcatgtatgtctgcagagatatgcagagattattttcagggagggagttaattctacttttcccccttcaccttacatgagaaattagtactgatctttgaatcccagcagagggggaagcaagaaactagtataactttttaaaatatctcattgaggaagtgacttcagggtgtggtggcacctcccttgaagctaagaaaccataagtggagaggtttgacttccccttcatgctcttaaaggaattgggagtgcttcaaaacccatattcaaagctccacagtgaaccaaatgataaggcatgcaaaacgtttttcatcacaaatgcacccaggggagagctgtatgcacagcctccatcctttgtacaacagcaaaaatcattacttggtgtgccacagcccagagatgtggcctggggacaaaatctagactgccagagaagttgcgccctgagaaccactgctgctattcttttccctgcagattcctacaagctgataggcccactgggctattctcatccctagttgggtccatggatgaaggggaggtgaaatgcaagctcatcccaggttctccactctatgtcatcaaactttttaaatttttagacaactgggatgagccccaattccaaaagcctatactgagtgctggaaaatgtgggggtgggggctgttaggataataataggatactggtgagacagacgaaaaaacaaatgtaaaggtgaatagtttatagtccctgtgctcaagaagcttataatctgggggtagtcagacatgtactcaaatctgtctgatataagattaattggtaacaccagggaagatagaaaataataaagaataaaagtgaaggatttgaacctgaaggatccaggcaagcaaagtgggaaggaaacacattgaactgagtctcttaacaatctgagaatgattgacaaatgagagaggaaggcatttggatggagggaaaggtgtgccatggaggcacaccctgagggacgtggggtagcccacagggtcttggatacttgtaacctcatgtacccatttctctcctcacaggctacccagatcctgcttgctctaatcattgtgggctttggaactatatttgcacttaattacatcggtttctcccaaagacttccccttgttgtcctcacaggatatccattctggggagcacttattgtgagtactgtcgattagaagctttggagaaattgctataaagatagatttgaactgcttcacgtcctagggtaatgaattccataaatatggccctccaggagaccaaaaaaggcagctcccttcacggcaaaagaagcaactccatttggtcactgcactaccatcatcattgtaataactactctcaggtgcttaaaatttgtttccaaagcccttgtgtgtatagtaagacatttgctcctcaataccaacctgggagactagatgcacaaatatcctacttattcctttgcaaataaggaaantgagctcacaagtagagaataacttaaacatatctagcctacctagcactcatggaatcacagactctgaaagcttaaaaagaattttaaaattattatcactcatcctccttcttagccccagagacaactttatgagtggcactcatctagataatcatatagccataaatattattcttaatacagtgctatttctatccaatccccacagcctggattcctaattttgtgccataatatttaaggacagactcattagagcttctcctactataacatacactcctgagaagacagcagtgttactgtctgttttagttgttatattctgagaacctagaatcatgcttgaggcatagtgtgcatgaacgaacgaatgaatcaatcaatcaatcaatcaacaaataggtgaaataattaataaattaggccactatctctgactattaaaaatccacagtctcttttgataaacagaaatactccatgccttttctataatgtgcatttcagaaacaaccagcagtgttttcattttcccaatataaataatgtaatattcaatatgattttcaaactatacatgccatactgtagaaaatcaaacagaccaacccctcactttctcatttcacaacagaattgtcccagtgtgactttgtgtactctgcatgtgtgaattaaaatgagattctggcatgctgcttttgaaaactctacttttcacttaaaagatatttactgagcacataccgcgtcttcaatggcatcctaggtgctgagactgagaatactggaaaacagctcctctctgagagaagtggtgaattgttcttagatttagacagtttgtcatctaactgggagactagacatgaaaaagtcaaaagtaaccccaaatatttgttcctacacttgtgctaagtgctctaagaggagagttccaggtgcgatgtgagggtttaatagaggactcacctgaccatggaggtcaggcaagtgctttctgcgtagctgctcactaggcgaagtggaaggaaagcatccctggcaaagataaagcatgagccaagggcttgatgtgggaaagagtaaccaaaagaagaccaatgaatctatcgtgatggcataaaatgaggctataaaggtagggtgtaaccaggtcgtgccaacccctatagtcatgttaagaaaatggaacttcaatgtgaaagcatgggaaagccactgaacgtttttaaagaggatagtgacacttgaagacttgttgaagtatcattgtgtttttagagtgagaaattaattcaattataacagtaaacctaggagaatccaatgagaggaggctacaaacacacagatgaggaaagagtttcccgaactagcttggtggcaatggagctagagatggagagccttgagagtgactcggaggtagaagtgacaggacttggcaatccaatgtggggagtgaagcggagggaggtatcaaaggtaactttctgatctctgcaagtcagctgcagatccttggactctaagacccagatgtccccaaggtccaaggccagttcccacagagaaggttcccatccccagaacattaaaaaagtaagggactccacatggagtgacagagttctcattttcctgaggtggtactaggctctacgatcatgggaaatgagggactctgataactacactagatatcagtccccatatcagcctttagaggggtcttccttgagaaagtctcccttcacctgctcagaacaggcacagctcctcctcttctcttcaaggcccagagctcaggaatctctttttggagccccagccggatcaaacatctggtcctctggatcttagaggagcctgcctgtcccagttggccctggcagagagcgcttgttcagtgctgagcaaatccagcacaaagtttcttcctaccctacctacgcctaccttccctactccctgatgctcaggtggaaaaacgggatggtcttggagattcacaaacagatattttgcaaatccaagggaaattatactgcaaggtggtcaaacacatcacctgttaacttttgtctcttgtcttcttaacagtttattcttacaggatacctcacagtaaccgataagaaatcaaaacttctggtaagccacttaaactacataaaatttaaaatcttctatttgttttatatcatctttatgtatgaagcctttagtaataaagttacctttcaggaaaatctgtatgcatcaaagttgcagttcagatcattcctatttgccagtgccactgtttgcctgacagacattcttacacttgttcccatttccctggtcaagtaaactaaaagagttgtttattggaaaccattctgcatccctgtaattcattgtttgtaattaggggtaattccctgccctgcaccccccaggacccagaaatattggacaacatctgaagacatttttggtcattacaactggtgttattggcaacaagtgagtagaggccagggacatttctaagcatctaaaatgcacaaggcagcctccccccaacacaaaaattatccaacaaaaaatgtttatagtaccaaggttgagaaaccttgctctaaccaaaaccaatcctaagctctcactaattcttcctcccaatcctagccctatctccaataccaaccgaggcttttctttagatcctgcccaaggtctggaagaaagagtttgggcatcaatgctggattgttctaggattgaaccaaggctatcactcacttctgtgttaacctgaagggaaaagtgcctacttctaagggttattttgagagtttaatgagacattactgataaaaggcaagatgatgcttaaatgttcatactcctttctaaccactctgatcttgtttaaggtcctggggatgtgggcctctctgaaagtcagttgaactctgttcttatggtcctctgccagtttcctctagggatagttacaaggcatagagacattctgaggggagggcagataaatgtttccatccctgcttatggaaatacatgcagacaatgcagatgaagccccaaatgctgttctccctgtattgacttccttccagagctgagaaataaactatgggtaaggaaaacctactcctgactcactgagagctatgcagatggaggtgtgcaggaatgatggaggcaggatgctgaaccaggcatcagaagacctggcttttcatcacagcccttccacaaaccgtgaaagtgattgctcacagtcacttacttccttaattccatttatctgtaaaatgtggataacaacaagtgtccttcctacagcacaaaagtataatgagaatcagaagagactaggctgggcatgttctttgtaaagcccaatacacatgagggattgattatctagagatcttagtctataaaatgtcctatgggagccaaaatagagccttgagaaaacaaggggactaaagaccaagagagagatggcctatctatatgttcctgtgcattttctgccaaagtgcctatttgcaataaaaacctgggattgaggtaaacattaagtcacaagtacacttctgaggtttgccacaccaagccacaaacttccagaaaggactggctgtgtaaaggcatcattgtattttccaccacggtagtcataacacaatcaataaaggtacagcaaatacctgatgaatggaaatgtgaagcttttctttgtttttcctttaaaagagtgatatcagtcctgggagtgggtaagaaggaagaaatcagatgacccccttcctgtaaaggaactcggatatacctaccccacccacccacacccccctccaaaaaaataagaatgaataaagggaattgggtggggcagtgtgaaatatttttattgcaacaatgagttcaagaaaaaacacctttaaactccagtccaaataggttaacatctttaaatgttaacgattctgttgattattgcttgaattctcccagggaatgactgtaaaccacatgattgcaggatgtcacctcttttgttcatttttgtttctccagggcctaatgcagtactcacatgtatctggtgcacattaaatatttatgaaataaatgaataaatggatactaccctaaaagttaggtgacacattcacatttttaaaggcagaaattgagattccaggagattaggttacttgcctaaggtcctagtgaaacttggacttgaaatgaggtttcatttccaagcaaagatatttgctaacacattgtactgcttccagattatgaaagatggtggtgataaaatgagataaaatgggataaaatgaacattttctttagcattagccatagagcatccttagcccattctaaaacttggtttgtcttctgactttaatgagttagaatttagtttattaagccttccaatcatactgacctgatggaacaactcttccctgagaagtatctggaaagataaaagcactaaaaatttcttacaagatatttttgctttggtttcgatcttatttattttatcatttttaaactatctttcagggtcaaggtgtcacgggcatgaatgttatcagctccttggttgcgataactgggattactttcaccattctcagctacagacatcaagacaagtactgccagatgccatcctttgaagaaatatgtgttttcagtagaactcttttcattgtaagtggtcttattttgcatgaagaatccctaaaatcttctctgaactgtgtccatgatgtaatgattcactgatttttattttattaaatgaagttgtgtcagcatttgaactgacggttgagaagggtaccatggggttactgttacaatggttaaggagcgatattttctggacttgaatcctgttcacacaagcttgtcaccttggcctaatattgtattctctctaagcttcggttttcctcaagtggaaaatgaacataatgagaatgcttacctcatgggttgttgtgaggattgcttaaattaaaacagtaccttgcacagttaaatagtcagtaggtttagctaatacaattattatggccatagattgaattaaattttactgtttcagcattaatgaacaaaatgatctaaaagtttgctcaataacactgagatcaaaatacagtgggggaaggtatttagaagtcatttaaaaaaataaggatttttataagcttaagacatacattatttcacataattgtggcaattttattcattaaagcagatgagagatcttttaccaggaaatgtagttgtctgtgcaatttaaagtatttatctaacaagtaatcagtgacattatttttaagcatgtcagtgactccaataggcctttctctctagttccctaagcaagtcctggggttttattttattcctaccagctatatcttgaagcatgggttctataatttgaagaatatttgaatccgttagaagggaaataaagtggaatcacagaaaatggtcttcctcagtaaataagaaatgagaagttagttcctgaatacaagaggtaatttaatcctcacaatcactcagtgaaatggtcccagggactctctcatgtgttctgagataaattctaaaattagactcatgatagattactaaagaaagccagaaaacaacataagcgataaaaccctgtcctaactgggccaagaacatgatacaacattataattcttggccattgctgaatggacaggaggcaactactgtttgttatgttcgtatatacgaggaagaacttgtatatacccgaaagggttaaatctccagatatatgaaattccgtatttcctgctgtccatggatgggtattgcaagattagttacctgcatacagaaccatgaacaatctcttcctagttctcacttacataacttaacaatttcttgctgtaacccaaacatcataagctaaaagagccagaacagtgggctttagatgtctcttgggctgacccctgtcctaaagaccaatctattgtctatactgtggctagagtaatcatttaaaaatgtaaatctgagccattacttaatggcttcctgtaaaacgtatgatgattaagacccaaatcttaacagccttaccaaaccctgtaacacctatcctacctatctttccaacattattccaggacttcatccttctcactcctccacactccagccacttcctataatcccttaatgtgtcaagtatccacggccccaagatgatcagaggatcagcttcttccggctttgaaccgtcaccaggccagttatacaattaactcatcctcatacttaaatctcaactgaaataccacttctttaaggaagttcttcctgacctcacctctatgctcatatctgcatagatcccccattagagtagcgcatagctcccaatccttcttcacagcatttatcacaatttagttaggtaaataattatctaattacttgttattgtctgcctcccttaccatgatgtaagttctacaaaatccaagaccaggtatatcttgttcaatggagaaagtcagtaaattgcatacaatagggtcttcatacatttcagttttaccaacaaatattgaatatttaagattttgggtgtattgcagggaaaccaagattcagaaacacacagttatttgttcaaggttaagtgggactttggacccacttttttttttttttgagatggagttttgctcttgttgcccaggtttggagtgcaatggcacaatctcggctcaccacaacctccgcctcctaggttcaagcaattctcctgcctcagcctcccgagtagctgggattacaggcatgcaccaccaggcccagctaattttgtatttttagtagagacggggtttctccatgttggtcaggctggtcgcaaactcccaacctcagttaatcctcctgccttggcctcccaaagtgctgggattacaggcgtgagccaccgcgcccggccaaccttggactcactgtaactcaggtctttctgtcttcatagtttaaacttttgagacaccataaggtaccatgttacttctcaatataaacattaccttaaagcaaaatgggcaaaatggcaatctgtgggctatatccagcctgtatatatgttctatctggctctttagggaaaaacaaacaaaataggcattatggtatccatgttcccacatgacagcaattggctggaattgagtaatggatgcctcctatgaatactattactctctactctttccctgtttagttcacaatgactgcccagctcccatggacattggagtttgttatccctgcctcatcagaaagacacaagatgaaaattgtgcagtgtctgatggctacagaaccatccaaaatatgggtttcccatacttggtgatagagtgtaaggggttctcagcttatatatttaaaataacagctctcatttcaaataccatttatttctcctcattatttgcagggaattttgttaatcttactgatcatcagcatagcagagctcagcatctctgtgactattgcatcctttagaagcaagtgctggacacagtcagatgaggtgtgttctgatgtctcttaatattattaagagaacaggttcctgttcctgttgggatactgcacacaatgatgtctgatttattagtaggaaaagcagcatgctcagatgctgaaataaaacatctaaatttaggaaggtcagagaggggcaagcttaagattgaagctcaccccaccatctgaaacaactatgctttcctttcttgtactatctgctttatactcagtcatctctgttaagacatagctccttatgtctctgccaaaaatatgtaatatcagacttaacaggaacccaaattactgtgacatggggtgtatattcttggatcataagatgtgtgacacagttccaccaccacaaaagaaataggaaaaaaagctgttactactgatactacatagtatttataataattgttatagattatatttactgaattctgactatgtcagtcactgttataatcactgagcaccaacttaatcttaacaaaactattataacatctttattttacatatgaaggaagtaaggcacaaagaggctaaactaacctctccagtaccacataacatcaggattctgacccctgtgatatgtctccagagcctgctcactaagtcccaaataccagtacaggccttgtgatttatggagatttcatttctctctctagctctctcttttttttacatcaactttatagaagtatcatttataaacaacaaaatgtacctatgtttagctaccatcacaatcaaggtatagtgcattcctagcatcccggaaggttcactggaacccctttgtagtcaatgttctcatcacctagattggttttgactttccaaaatttcatattcatggaatcataagtaagtactctctgtatatggcttatatggcttcttccacacagaaatatgtttttgagagtcatccatgctgttgcctctatcaagaattcattccctttatgtatgggtacaccacaatttgtttatcaatttacctttttttttttttttttttttttttggagtcgagacctcactctatgacccaggctggaatgcagtggcactgtctcggctcactgcagcctcaatctcctggactcaagcaacctttccacctcagcctcccaaatagctgggactgcaagcatgcgccaccacccccagctaaattttttttgtattttttttgtagaaatagggttttgccacgttgcccaggctgctctcaaactccttggctcaagtgatacacccaccatgaccttccaaagttctgggattacaggtgtgcgccactgcgcccagtccatttaccttttgatgggtatttagattgtttaaagttctgaactattatcataagttactaagaatatttgagttcatatatttgtgtggacatattttcacttctcctggagtgttgcatctaggatttgattgcgagatcgtatggtaaccagatgtttaactttataagaaaataccaaacagtttgtcaaagtggctgtattgcttttcattctcatcaacaatgtgtgagagggacagttgctccatatcattaacacttgaaactgtcagtttattaataatttagctattttagtgggtatgtagtggcacctcattgtagttttaatttacatttccctaatgactaatgatgatgacactcttgctatatgtttattatccatttgtgtatcttcttttgagatgtctgttcaaatatttagctgaattttattggattatcttcttattggccttatagcagcctaattaattcttaatacaaatcctttacaaatattttttcacactgtgacttgccttttcattttcttaatagcttctttgaaaaaaacaaatttgatgaagttccatttatcatttttgcttttatggttatggtttttgtgttctgtttaacaggttttccctacccccaaatcatgaaggttttcttctatcttttcctacagaagttttataattttagcttttgtgtttagatgtatggtctatcttaactttcatgtacagttgtagggtaaggttagaagttaatgcacatcccccctcatggagatatccagttgttaacgccatttgttgaaaatgcaatgctttcctccatcaccttggtatttttgttgaaaatcaatttacttattatttatttgtaggtctcttttggatactttttccctctggccactacgtctatccttccacgtattctacactctcttcatttctgtgtctttagagtaattcttttgcattgtggtgaaatatatataacataatagttatcattttagtcatttgttcaaatcattgaatacattaataatgttgtgtaactctcaccactatctatgccccaaaatttttcatcatccccaacacaaactctgtaccacaaaacaatcactccccgattcccctcctgattgcccctggtaccctctatcctactttctatattatgaatttgccttttctagagacctcatataagtggaatcttacaatatttgtccttctctaactggcttatttgagtaagcataatattttcaagattaatccatgttgtagcatatatcaaaatttcattccttctatgactaaataaaattccattttgtgtatataccatattttgcttagccattaatttgttgatggacacagatatttctgccttttgcatattgtgaataatgctgttacgaacattggtgtaaaaatatctgctcaagtccctgttttcaattcttttggatacatacctaagagcgaaattgctggcttatatggagttctgtgtttaatgttttgagaaaatgccaaattgtttttcaccttcgttgcaccatcttacatttccactagcagtgtacaaggattccaatttctccacatctccatcaataccaaccaacaggggaaaagggggagtaattattttccatttatttttaattttcaatttatgattgacacataattgtacatatttatggggtacagtgtgatgcttcaatgcatgttacattttctaatgatcaaatcatggtaattaccacattcatcactttaaacatcatttctttgtagtgatgacattccaaattttctcttctagtcacctggaaatatacactacgttgtaatttgctatagtcatgctactaagtatagaacttattcttactatctatagtaagtaagaacttactcttcctgtctagaattttatacccattgaccaatccttcccggtcctcccatcctccctaccttccctagcctctggtaaccactattctagtcttcacttccatgaagtcaacttttttagattccaaatgtgtgtgagatcatgcagtgtttgtctttctcagcctggcttatttcacttaatataatgtcctccaggttaatgcatgttgccacaaatgacagaattacattctgttttatggctgaatagtattctattgtttgtgtgtgtgtgtacattatatatatgtaatatataatgtatattttatatatatatatattacattttctttattcatttatgtgtagataggcatttaggttgattccttatcttggctcttgtgaatagcactgcagtaaatatgggagtacagatgtttctccaactgtcttcatttcctttgaatatataccctgtaatgggatttctggatcatatttgtttttatcatggccatcttttttctttctttctttccttctttccttctttctttctttctttttctttctttctttaatttttatacaaagactatgtcacttaggctacagtggcacaagatcatatgtcacttaggctacagtggcacaagatcatagctcactgcagcctcaaactcctgggcttaaatgattctcctgtttcagtctcctgagtacctgggatgaaaggcatgtgccaccacacccacataaatttttatttttatttttatttttgtagagacaaggtcttgctatgctgtcagggctggtcttgaactcctgcctttaagccatccttccaccttggccttccaaactgctgggattaaaggcatgagtcaccacacccagccttatataatggccatcttaatgggtgtgaagtggtatctcatacttttgatttgcttttacctaatgatttgatgttgagcatccatgtatacatcttctttggagaaataactgttatagtcttgcctgtttcttaattgggctgtttgttttttgttgttgaattgtagagttctttatatattctggatcttagtccctcagtagacatatgatttgcaaatattttctcctattctgtaggttgtctttgcactttcttgatgacttttgatgcacaaaagttctttatgaagtataattaatctattattttgttgttttctgtgcctttcttgtcacatccatgaaattattgccaaattgtcatgaagatatcttccaacttttttccatgaaatgtatggttttagctcttaggcttagtgtcggattgattttgagttaatgtttgtatatggtataaggtaagggtccaactctattctttcacatgtggatgcccagttattccagcatcatatgttgaaaaaattcctttccccattgaatattcttggtgtctatgttgaaaattgatttactatatatgtgatataagtgagcatttatttctgaatgattccattggtctatatatcttcccttatgccaggtaccatattttttgggtttttttttttgtttgttttttgttttttgttttgatggagtcttgctctgtcacccaggctggagtgcagtggtgagatctcagctcactgcaaactctgcctcccgggttcaagcaattcttctgcctcggcctcctaagtagctgggactataggcgcatgccaccatgccaggctaatttttgtatttttagtagagacgaggtttcaccacattggccaggctcatctcgagctcctgacctcaggtgatccacccgcctcggcctcccaaagtgctaggattacaggcatgagccactgtgcccggccctgtattgttttaattagtgtagctttacagtacgtttcaaagttggaaagtataatcactcaaactgtattattctttttcattattgttttggctattcagggcctcttaaaattcaatatgaacttgaggatccatttttccatttataagaaaaagactgttggaattttgatagaaattgtattgaatctgtatattgctttgagcagcactgacatcttaacaattttaaatcttcttatacgtgaacacaagatgtcttttcatttatttaggtctccaattacattcagcaatgatttatattttttagcatagaggtctttcatcccattggttagatttattctaaagtatgtaattattttaggtggcattataaatgaaattgctttttaaatgttattttcatattgtttattgctgttatacagaaacaacaatgattttttgtgggttgctcttgtatcttgaaccttgttgcaatcctgtattaggtctagtagctttcctgtggatttgggaggattttctatataggaagatcatgtcatctggaaatacagatggccttaatctcctcttttctaatttggatgaattttatttctttttattttctaatagctctagctagaacttttagtacaatatttaatagcagcagtgaaagaaagcattcttatatagttcctgatcttagggggaaagcttttaatctttcaccactgagtatgatattagctgtgggtgttttataaataaactttacatattgaggaattttccatctcttcctagttttatgagaggttttctcatgaaaggcatttcatcaaatgccttttctactccaagtgagatgactgtgtgggggttttccaacattatattaatgtaatgtattacatttattgattttcttattgtaccatccttgtattttgcttatcaatttcacttcatcatatgaataatccttttctaatattttgttggcaatttttgtatctacacttataaaggatattaatctgtaattttcttttcttgcagcataattatctgtttttggtatcaaggtaatggtggcctcatagaatgagttaggcaattttcccttctcttcaagttttcagaagagtttgagaataattgttttttttttttctttaaattttggtagaattcactggtgaagccatctgatccagaagtttcctttgttaggaacttttagattacgaatctttttacttgttatggatctgtaaagattttctatttcttcttgaatcattttaggtaatttgtgtgttgcaaggaatttgcccatttcttatacagtatctgatttcttggcatataagtttttatagtattcttttacaatactttatacttttactctctataaggtcagtaataatgtcttacttttatgtcttgttttaattgttttattgtctttttgcttttcagtataggtaaaggtttatcaattttgttgatcttttaaaagaatcaacatttgggttcattgattttctctattgtttttcaattctctatggagatttctcttctgccccactaaaattatgctagagtaattcttgaaatcagatagtataaatcttccaactttgttatttttcaaaattgttttggctgttctaggtcatatgaatttccacataagttttagaattcgtttattgattgctacaaaaatcttgctgggattttggttggaattgtactgagcctatagataatttataaacaatttacttcttagtaatatgtagtcttctgatccatgtccatgaaacatgtctgtattttcttacatctcatttcatttctctcagcactattttattatttacaatgtataagccttatgcatactttgttaaatgtatctgtaattatttcattttttcttgatattgtacatggtatttttaattttattttttaaatgttcattcccacatatagaaatgcaatttatttttatatactggtctactatgacctttctaaactaacttattagttcccatagcttttttttaatagagtttctagaattttcttagtagataaccattttaagtattaataaagacatttttactcccaaactttatgcctcatttttcttgccctattacactgtgtagtctccaatacaatgtttaaaataagtgatgaaaatagcaatctttccttgttcttgatcttagggtgaaaatgttcaatattttacccttaaatatgatgttttttgtaggttttttacagagtaaatttaccctgttgcgcagattttttaaaatcatgaatgggtattggcttttgtcatttttcatctcatgctttcatctttatcgtattatctgtatattacacaactagaggagagtacaaaccctgttttaagccctttagaaacaatactaaaataagttacactaaataactcttcaattgaatttagtgaatacagatctttaatccactaatggcacagtaatgtgcaaagtacaacaggggattcaaaaataataaaatatgtaccttgatctcaagaaaaggaaagggaaagtgaactctacatttacggagaaatttctctgtgccagtttctgtgcttgaaagtattatttcatttggtctttagtcttagccaccctgaagtaggaagtaggtgacgttattaatacaagaagcatagatcagagaggaaagcacaggacctcagattcaactacaatttttaaatccttcccaagtaaacagctctacgatactggtctggttatttaacatctctgaacctcaattccctcaattctaaaagaaggataataacttcatagggatgtcataccaatttttgtgatgactttggaacattgtctagcatctggtaatcactgagttctcattaatggatgaggaaatttaaaatcatagcacttaagagctttaataaacagagaaactataattatttcttccaaacctctttttaagtggaagaataaattaaaattcacatgaaacaaagtttgaggattcttagaaatatagaaatctcttccaaagtaccatttatactcacataaatagtccttcaatagggataaaatataggtgtgaaaaactaattagaagaatgggaaatgcaatgtattatttcagagaatgtgtagattctcaatctaggcctgctattagcaaacgaggtaagcataattaattcatttaatcactgagttctgatccacttcatcaaatagaacaagtagtctattctgactatgaattatctcagaaaggtgtaattcatggagtcagaataaaaagcagcaggttgtgctgcagtaacaacctcctaaaaattataataataaaatgagaactaatgggaagcattgcaggttgtatcagatgtggtcacttagctgtttaaaaaactccaattgcttcctcttatttgtaaaggaaagtccaaatttcctagcctagcataccatctaataatatcagtaatatctaactgcttaccatctgccatcacaccatgctatatcacaaccttgtgtttttgtacccgctattccactgctgcttctacctggattctgactcctgtcttatttcatcttaccgtctatgcctgagtaattcctactcagctgttaagatatagattaaatattgcctcttctgtaaagcatttccaggttgtctcagaattaggtcatcttctatgttcccataaagcactaagtacctatttatgtaattgcatttgctgaattgtattactattatctatttatatgttgatgtacagatagttgtgagcaccttaagggaaaatcccacatctaattgtctttgattcccagcatttagttcatctgggtgatcaataaactattatagattaagcatgaatatatgaatattgactagatgatataaaatgtctcagaagctttataatattaagtatgggaggaatttttgaggcaatcttaatcaaattcctctgttcaatatttgaaagactaaaaggtgatgacttctaaaataataccaataagttaatggtaaaggcaggactggcattcgttttctgccttctcatttagatgttatttcctatctactgtcttaagtcagaaatgaaaagtaacttggaaaacaaaaaaaaaatcagacatgattctgtcatattaattaccctcatccttgcttttataggttctgtttttcttgccttcggatgttactcaaaatagtgaacaacctgccccagaagaaaatgatcaattacaatttgtgcttcaagaagagttttccagtgatgattcaacaacaaatgcacaatctgttatctttggaggctatgctttcttcaagttaacactctctaggagtcctttagtctcccaaccaggtaataaaggtagagaatttgtgccagatgaacaaaagcaaagtatccttccatctcccaaattttcagaggaagaaattgaacctttgcctcccacactagagaaaaagccctcagaaaatatgtccattcagctagactctacatttaaacaaatgaaagatgaagatctacaatctgctattgtacaaccttctcaaatgcaaaccaagcttctgcaggaccaagctgcgtcactccaagtttttccatcccattctgcactaaaactcgaagatatatcacctgaagacttgccatcccaagctctaccagtagaaggcctgtcagaacaaaccatgccatctaagtctacatcatcccatgtcaaacagtcttctaatctgacagctaatgacctgccccctcaaggcatactatcccaagacacatcatctcaagatatgctgtttcatgacatgacatcccaagatatgcaatccctagatatgctatctcaagacacaccatcccacgccatgccacctcaagacataccttcccaagatatgctatcccaagctctatcagcgcatgccatattacctgaagcctcaacatcccatattgtgcagttccctgaaatacaacacctacttcagcagcccccagatcttcaaccagaaaacactgaacctcaaaaccagcaaattttacaaatgtcatatcaagatattagatcagaagttatggaagagaccaaagaatggaaatctgaggaggaactccatagaagaaaatcctcaagacggcattccttaaaccagcaaaccaaagccttgcaatacttaaggagacattctttagacgtgcaagccaaaggccagaaatcctcaaagaggcattccttagatcagcaaagcaaaggctggcaatctccaaagcagaaatccttagaccagcaaatcaaagactggctatccccaaagaggcactccgtagataagcaagctcaacttaatcaaactaaagagcaactcccagatcagcaagctgaagatcagcaagccaaaggggaacaatacccagaaggacaatctaaagatggacaagttaaagaccagcagactgataaggagcaaaactcaaagaagcaaacccaggatcagcaaactgaagaccagccggcccaagagaagaaatccccgaaaggacaattccaaaatgttcaagccgaaggacagcaagctcaggtggagaaagtgccaaaactgttatgccaagattcagaatcccaaatacagcaataccaattctggcaattccacaaaggcaatctccaggctggacaacccaggactgtcaatcttttggccaagaatcccctgactggataactcagggctggagaaacaaagattataaagcacgagaatggcaatttgaaatgaagcactggcaaacacaggatctattagagaaagaagccctaaagcagaaagctctataccaagaagtccaaacccagcacgcaacagcccaacataacctagaatgtcaagacactcaagataaagaccaacaagaccttcaatccagagttacacaaaaaggagatatgtacactagagacatcaaaccaggggacatgaaatgtatagggcaaacctcaggggacctgcaatcagaagacgtgaaggcagattttcattcttcttctggccaaagctcagtacaagacacatgtttagcctatttgtccaatctagattcagaacaagatgtgcaaccagacacttcagcttcctcaaattcatataaagaagatgtgaatttaacttctacttcatgtgatccaaaagatcaacagcaatctgaagactctgactaacatgcagaatctacccaataccacactgcccccattaatggaattaaattgggaaaaacaatattgcctcctccaatctgtgttctcaactgtggttgccacctcattaacttacaaaaaaatgaagggcatgctgagcactcaaacaatttgttcttacttaaaataaaatgacaacaaaccaaatgttaacactgtatcatcactttatgtatgtgaagaaataattcacatgtatattccttgtcatcaaagttagtgtttcagtttataatcacgatttcattttataacttaatgtttaatggccctactttggtatgatgctagtatttttcatctcccccttttggcattataggagttcagaaaatcaaccacagggaagtctatgaaggctctctaagggttcaagaaccaaaagagtcagcaaggaacaaaaatttctcccatttccctgtcttgctgtttccaatcctcttatttactctccctcctcatatttatgttgaggatatatggactgagtttgctcaattattaatgaggtagaatgtggcaatgaatacagaatgtgatgatggagtgggagggattaagagatatctagagacaggaaagtagaaattagggaagaacagagatgcagatgtcataatagaaaatatgacatactgtattgtattcagtgaagcttcagctcccttctttatgcctgcatttactgattataatttctcaacccttatgatacataatttcatcctctgtcatcaaaggaaattgtgttatcaaaagctatcagttacctcaatcttccaagcctaatcgtgttttttcaatcctctttccctttatctctgatacatttggaaaggttaacaatcccttttctttcaatttttatcacccccattaacttctgtgttttgcacttcctgtttcaaaaattctataataggtatttctagggatctctccccaactttattcattttttgtaatgacaattcactattacagttctctcaccttcttgtgaataatccagactgtgtcatatttgtgtcttctacagaatttcagcacaaaggcttgattcaagaatacattcaataaaacatttttaagggcataaatgggagcttggagtctctacttagaggtgaacagagaagttatatgtagtagtataataagatacagagctccttatgactggctacatgttccttgctgcctgtgcctttgtagtaaaatattagcttcctgagcttcacatgattgcttgaccttgatagagtccttacctgagttagcctttagttcctgaatgaccaccacctggtattttaacttactctgaataatactaataatttctaccttttcctttagctagattagcacgtttctacagtgcttatgtagagtttaactttcagtctacaaacttgggtgtttaggaagtatatatatatatatatatatatatatatatatgtatgtatatatatatatatatatatgtatgtatatatatatatatagagagagagagagagagtgtatatatatatatatatatacacacacacacacaattttgtatcaaattctttgagaatccagcccacacagttactcttgccagttcatccctatatctacccaacatacacaaatacatttctgcagaaatgtacaaagatcctggaatcttaaatagtgccaagtcactggagaggcaatttccatcatcagcgactagtccacaccagttaccactgagaaacttataggccaagttcaaatataccgtatgtgtcctgtgaacttgttgcttctatgctacatttggaacatggaaatttttccaaaattgcaagaatacaacgcctataggttagacttacaatatgagaatggaagaatgtaaaaaaccacttcttctgaggcctttccatcccactgagggagatgctaaggggcaagtcagaagctcccaaggcccccagaacccatagtaacctttctagtctacagaagactctcttttctctctgtttcttgaaggcattttcccttgacctcccctttctgagacacctaatactgtcctatcaatgagtttgggtctgaagttgacaaaatcaaatgtgtttaagacccataaggaaaaataatgtttgaagtatctgtttaaaagacaaaatgcaaaaggctgtgggaaactagaaaatttatgatttgcttaaaggcaacctaatttttttattaaaaactgtcttattacaaatataatatgtgtttcctagaatatgtcaggcttctttgtagtaaaattgggaaaagttgatttgagatactgctaccttacacactcagttcccaagaactgtggaaaaaaaaataagctggctgcttacaattgcattttcatttactagaatcaacaacctacagctaaattatacttcccagccaccttgcatctaggtaggtgagatggtaactattgccaatggaatgtaaagtttgactcctaaaatcaccaacattatatctacaatatttttttccctcatgcactggctagatgcagagaatctaggatccacaagaccctgagtctctagagaatggagcctggtccataaatcgtggtgtggattacttccagtttgaatattcaactggattgtgatctaaaagaaaaacccatattagggcaaggaatgcatggagctgtttggctagaaggtagtctaagctgagtaatagagtctttaaggcacaaaaaagtcaaatcttgctcaaaatggcaggactcctactcgtatctccttgtgttagttacctattgctgcataacaaattaccacaaaggtagctgcttaaaacaacaagcttattatctctcagttcagaagcccaggaaagcttggttaaattatttgtacagaatatcacatggctaaaatcagaggactggccagggcagtggttctggggttgagctcctcttcaaagttcatccattgttggaagaatccagtcctcacggctgcaggactgaggttcccatttccttgctggctgtcaactgggaactgctcctgcatcccttctcatgtgatcccttccatcttcaaccaggtaacagtgtgtcaagtcttctcaaacccaaatctgactccctctcctgcatctggttttaaggagtccttttattacactagacttactggaataatccaagataacctattttaggataaattgattaataaccttaaatttctgtgcaaagttccttttctcattgaagataaccacaattaggaaagattatgggctcccataaatagtcacatggaaaaatacacacaattttaaaaattaatgttttcctaatttcttagaaacatgtttgacttttaaagcaggaactaactgaattggtgttttaaagagattactgtggctgcagtttggaggatgaactggagaaagaaagatggcagcagggagtcaattaggaaactcttaaaatagtgaagaaagaggtgctaagtgatgtagggatgtatagaagagtagagactaaaatgataattcaagagtaaaattgtcaggatgggacagaaactagaggtgtagaattgaagaaaatgaagaataaaccatctgctctagcttaaaagattagctggctgagacatcattaccatcaacaaaacagacgaagaggcacaggttgcagcaagagtaaggggcatagtcagttctttctagtgtagtgtattaggcagggttctccagagaaacagaaccaagaggattagacagatagacagagagctatagatagatatatagatgatagatatatagaagatagatagatagatagatgatagatagatagatagatagattgatagatagatagatagatagatagatagatagatagatagataaggaattggctcacatgattataaggctgagaagtcccaagatctgaaagctggagacccaggagagctgatggtatagttccagcctgagtacgaaggcctcagaaccaagagtttaaattccagttcaagtcttagtctgaaggtaggaaaagaccagtgtcccagctcaaagacaggcagagaaagcaaattctctcttgctcaggctttggttttatttaagccctcattggagacattgagagtaacactgggttttaccaccgttcatggaataagatttaaagacactattgttatttataattaaaaaaaaaaaagaaaactagaggatctggagactcctaagcaggtgacatcttgccacaacagttaactgctctagctctgctcccagagttgttctctccagagtatggatatggatctttttaaaggaaggctttaacagcagagaaaaataagagaaacttagaaacaaagaaaattgactttcagctgcagtaacagaagaatgagagattaaatgaggcccacccatattggggagggcatctgctttattcagtttaccaatgtaaaaacctcatccagactcatcctcatagacacactaagaataaagtttaaccaaaagtcttggcacctattgttcaatcaagatgatgcataatttaaccatcaaaaggccatcctttgtgaacctgacactcatatgcatctccttaagccatacttaatctccaaataaagactaaaaggtgataattcttcataatatgttacaactatcatgtatacaactggaaatgtaccaacctcttctcagaagaaggggtaaagtctgtgaatgatgtttactcttctccttactgtctagcaacttctatgatttaaattgtatgatgtaaagttaacaatactataatataaacatgccttatgttacatgattagagaatgagaaagaacagattgtgtgtgtgtgtgtgtgtgtgtgtagtttctataactggatatgtggacgtaactcatatttataactaccttattctactacccattctgtagtccctttgccttcagcaaacaccttagctggccatggttctttacctggtagaatgacccaaaccttcattcctgaaaagcctggacaattagtggtcctgcctggactgagttgttgtggttttcttaattgaccttaatcacagatcatggtaatactaagagatgcatgaagcgatctcctatattccaagcatagtgttcccttatgtccattgtggaatagtggtctaatttccccttagtcatcagaaacaatcaccccatccagcacagtaacccctttcagttatctgaagaggatggaagggctttgctccaaaattcagcaataaacctataggagcctaccttcccagaagctctatatagcatccctatctgccattgacacttcaagcaccattggatctgttgatggtatggtccaagcagaagtcagcttacacggaagccgaggcctgttgtgaagcttttcttctggtcctactcaaaagcagctctgtaagtcacttggcaaattggccagagcaacacacccaagtgaggaatatgttgcctccaaaatccaaagaaactcattagatgctgtgcctcctattcattgtggaagccagatgcgacaacttatcctcatgctggaagagattctcaatattccccacaccacttgatccctagaaatttcactgaggtacaagaccctgaggttttatcagatttattttccacactctggcatgtaaatatcttatgaataaatctagagtagttactacgtcttattcgctaggtccaatcagcataatgtcatcaacctaatggaccagtgtgatatcttgtggaaggaaagggcaattaagatccctgtgaactaaattatgacatagagctataaagttgatatacccccgaggtatgacagtgaatgtgtattgctggccttgtcatctgaaagcaaactgttcctggtggtctttactaatagctgtccagaaaaagcatttatcagatcaataacattatactgggtactagaggatgtgttaatttgctcaagtaatgaaaccacatttggtaaggcagttgcaattagagtcacctccaattggtaatccactgtcatcttccaagatccatctgtcttctgcacatgccaaacatacaagttgaataggaatgtggtgggaatcaccacccctgcaactttcaagttactgatggtgtcattaatctctgtagcccctccaggaatgtgttgggagtcaccaaccctgcatcttttaagttactgatggatttattaatttctgcagtaccatcaggaatgtggtgatgcttttgctttactattttcctaggcagaggcagtactagaacttccacttggtattccccaccataaaggtccttactccacagagtaagaaaataatatgagatcctaccacctattgagtatatttgttttaattatgcattctggaattgggggaataaccgcaggatgggtttgggagcccactgcacccattgtgagattaaccagagataaaactccatggatcatcggacctccacaaccacttactctgagtggtaagccacagtgatgctttgagtctcctggaattagtatcaattcagaatcagtgtctagtagtccctgagaggtctggttatttccttttccccaatgctcagtaccctggaaaaaggctgcaggtccctttgaggaaggctgtgagaaagatcaacagtacaaattcttggtaatgcaccaggtccttccttaaggagacctggtctcccctttcattcaaggagttctttctgggtttgtaaattttattgcaggtctgtaaactggctcaggtctgggaatggattgaggggctatgagtctatatttttatgattcaggttaggctttcattcaatgacctagaacttttctgcttatatagatcaaggggtaatttaaaaggatttctgtctattttacctctaggaacaccataatcaactagcccacacccacaccataggtctgattcaaatattaatcttatccatacccaccctcacagacacagccaaaataatgttttaattaagtatttgagcagtctatgacctggtcaagttgacacataaagttaaccatcgtattttgtttatactcacagtcttggggccacaatctggaatgagtcttagtcgaaatcacctgcacagatcagaggagctgctgggatgcaaatgtatactaagcaagtactcattgagatatagcattagcaggaacaaaaatgtattattttaaaacatggatccagagatcttctctggaaaataataatctatatttatgcaacctctcacttgtggttatcatgcctagaaaggcatgcaggcccatcacatttctgaaaggctgttactgttagtgaaccacacagacacaaagagtcctgaggaaagtgcagatctcctttgcagccataatatcctccatcagttcacaaggtactctttggacatttggaaattctcatctctcactctgcttcccccactaacacatacacacatacacctttctttccctgtggtccctgtgatttttttttttttttttacttctctgacctaccctaggattcaaatgtggagtttctggtcagagagttaaagttttatgcatcactggagaaagctttagttgtcaaggcaaagctctgaagcatcaaattgagtacatggaatctaaaggtaaagcaactggatcataattttgacccagcaccattactagtgggatactttgggaaagtttcttaaaatttccgtgcctaagttgagtagtactcagcacagggttgtcaagaagattggataattaaagaatgtatagtgtttaaaatatctgtcacggagtagatgctcaattttgttccataataaaacatctataaagctaattcttttactagtcggtattacttcttatggcataaacttgatctaatttatgccaccaaagtatctctctttattctgaattatacaaattatctccctgctattgagtgaactgcatcccactctaaattcatttgttgaagttctagctcacagtgtgatatctggagacgggcttttgaagctgttgggtttagatgaggatatgagagtgaatccctcatgacgggattagtgtccttatatgaaaagacaccaggcctctgtctcctgctctttttctgtgtgtgtgtccttgtgtgtgtgctcacatgcctgtgtacacacaaaggaaagatgatgtgaggacagaaataatacagtcatctgcaagccaagaagagagctctcataaggaaccaagttagctgacactttgatcttggaattcgcagcctccaaaagtatgagaaataaatttgtgctgtttaaatgaagcagtcatggtaatttaccatagcaccctaagcagaataatatacaccttttcttcttgcaaattgggaaagggagtgaaggcataaaaatcccatctgaccacaatgaaacaaagaaactttttgttctttaaacataaaattcctaggtagtcacaaagggaatatctaatacctatgtgtaagtccgaaattagtaattagagtgtttatgtcggaagatacagtaggaaatccctgttgctgcctttgtaggttctgtagaatggtcttctaatcttatttttaaagtatgctatatatgcaagactgtgctactactaccttagaggagtgaagaatcagaatgaaaaccagcaggacagtgcagtgagaaaaacagtcatcacttacagaagcccagacatgcagagaaaactaagaattcaatagatgcagaaaatcagagcttgagaccactccacacgatagaagccccagtggttccccttccctcgtattcgcttgctccttccaagaaatgtctggagacattaagagtgacactgggttttaccattattcatggaataagatttaaagacactattattatttataaactttaaaaacaaaagaaaactagaggatttagggactcctaagcgggtgacatctggccacaacagttgactgctctaattctgctcccagagttgttctctccaaagtatggatatggatctttttaaaggagggctttaacaacagagaaaaataagagaaacttaaaaacaaagaaaattgactttcagctgcagtaagagaagaacgatagaaagaatacagtgtttttcttggaactttccagcaagggaatcagacgagaggctgtgaggaaaggcctaatcccattgactatggttcagagaacttggattcctcagatcatcataacttctctggaatacttagcaataagaagcttgaaattaaggctgaatttcagaacattaatgaatacaaacatattatatattattccataaaccacattaagactagagtaatttgcattaaaagagtaggttttggcagattggaaaataagaagaaatatgaggatatggaaaatttttgaagtagtgaacagatacatgtcatcaatgtataaaggggcctagggcatttattagcaggaggccatggagttccacagccaccctgaaatggagaaattgtaaaataacgtctgtactggggccgggcacggtggctcatgcctgtaatcccagcactttgggaggctgaggcaggcagatcacaaggtcaggagatcgagaccaatctggctaacacggtgaaaccctgtctctactaaaaatacaaaaaaattagccaggcatggtggcgggcacctgtaatcccagctactcaggaggctgaggcaggggaatggcgcaaacccaggaggcagaactttcagtgagccgagatcgcaccactgcactccagcctgggcaacagagcaagactccatctcaaaaaataaaataaaataatgtctgcactgattcagtgtgacatttccagtattatagctaagctcatagaaacacatttaacctataaagaatcaacaaaaaatgaactttggaaagagtgcaaacataaagcaagacaaagtatctgctcaccatgctaaaaatggcaataataagagaaataatacttattactcttatttttattactactacaatttacttagcatctactacactccaggtactttaaaatttactcacaataactgtataacaatttttattctcataaaggaaatgtaatattttaataaatatgtaaattaatagataacttagcctagaccccataaatagtaaataaaagggcttggggttcattctaggtttctcttctccaaagagtaagtcttccactgcatcaccagattgcatgaattaaagaataataaaaaacaaagaacaataaaaaattaaagttatatttctgccatttgtcagatagctattataacactgtgctagtcatcatgcttagagggagaaaaaacaaaaactggggaaggtatagagcaaagttaaaacctgagtaattagggtgaaatggtgttttataaaagtatgttgcaacatagtgtgcttaacttagggaatgctaacacaacatcagatgatgttcatgaaggataatcaccattatgattcaacgtccatagaaaactgaacaagagatggatacgttcagagaaaagaaattgtgagggaggggtggccttttaaaatattctaactggcaactggtaagtggctagaggctgtcacatcatgaggttcaattaaggaagacctgatctcaataggaaacaccagaaaatgacaaggtacagttaaaaacagacacaaattgttcccttccctttctttcttgtcctttcaagatgaaagtacagatcctcccatgaagacattagggggcctattttcttacccctcgaatctgggttgtctatgaaatttgattggccaatatgacattaacacacatgactcagcagaggtttgaaaagtatttgtgaattggaagagaaccaagagtctgccaactgccagagacatgactgaggccatcctaattcatgtaattggacactccaccaggtgaccacagttgcatgagacagcctggtagagaagtgctgagcagccttagatgagacagaccacacacaggacccacagatgtgtaaacaaaagccgatggtggttgctggaactaactacattttgagggatttgttacacagctaaagctacttaaatcaggtggcaaaaccacaaagtgacaggaaaaatggatgttatctatacttcaagaagtggttaatttgttccgtggcctgagagattttgcgttctacctgtgtctgaagatatggaactggaataaatgtgtatctagttgccatttggtaactaaaatgtccttttttttgagacagagtcttgctctgttgcccaggctggagtgcagtggtgcaatttcagctcaaggaaacctccggctcctgggttcaagtgattctcatgcctcagcctcccgagtagctgggactacaggcacgtgccaccacacccggctaattttttatatttttagtagagatggggtttcaccatgttggccaggctggtctctaactcctgacctcaggtgatccgcccgcctcagcctcccaaagtgctgggattacaggcgcgagccaccatgcgcggtccctaaaatgtctttatatgtagatcatctagtccaatttggtcaatgtatatatgaggaatcagaaaccaggagagggggatgtgacttgccaaaagtcacagtaaactcctaactaaaccaggactacttgtcaggttctctgatccccagtcccaggcattttacttatagccatcttgggatcttgagcagtcctgagattctatgactctgtgactctatggttctataattccaagacaaagcaaacaattccagtgctccaggcagcctcagcacaagaaaagaacatggtctagactgaagtaccaactaaatcatctcctttcaaattatcaccgacaccatcatggattcaagcaccgcacacagtccggtgtttctggtatttcctccagaaatcactgcttcagaatatgagtccacagaactttcagccacgaccttttcaactcaaagccccttgcaaaaattatttgctagaaaaatgaaaatcttaggggtaagtaagacttgcccctatgtatattttactgaggcaggggaaaggctagggaaattatctgttggcacatgtttgaaggtaggagcctattccaattcttctttaagacaatgtgaatatagagtgttggtgggccatttgagagaggatgtttgagaagaacgaatcatgtgggtctggacttgacaaaaaatgctatcatttaggactcacctacttaaaaagtgatagttgctatggcagtaaatgagattactcagactgagaaggtggactgagaagaagagagcagagcacatagactcacacgtttttgtatattgtataccttccatttttgtatattgtcctcattagtctttcccagcacttgtcaaaccactgcttggtgtcacagtgcatcacatgagtggctcagagagggagagaaaaaaaaaaaaaacccgaagagatggagagtcctctgggcctgagagtgtgacaatacctcaagaggctcagagaattggccatctccaggcagggctcctcacagtccaattctgcttgaggccagcctggtatactcatttagaattcagtgtttctcagacattcacatttatgggctaaagaactgaagaacttatgaagacacaggtttcccagcctcacctggagaccgttcagtaagtatgggatagggcctgatagttcgcatttctagctcccaagtgatcctgatgttgccaatccatggaccacattttcaggagcactgatttagatcattttacctatcaccaaataccagatagaggaattaagaaagtacccaggagcatcataaagggacttctattattcttcccctaattaccaaagagagtaattgccaaatccttttgaccaaaagaagatattctaaacagaagggaaactatcactttgcttttcctcaccatgactttttcctctatttgcagactatccagatcctgtttggaattatgaccttttcttttggagttatcttccttttcactttgttaaaaccatatccaaggtttccctttatatttctttcaggatatccattctggggctctgttttggtgagtatagtcaatcaagttcaatttgaagccatgccaaccaggatgttagggaattcttcacaatgaaataagctagatccagttgtatgacatgctttcaaaagtgcaaaaaactaaccttgttgaaattatttccccattagttcatcacagtcactgatattccatcattaggtcttgaagttcctttgggaatacttcttttgaggcttgcagttgtttatttggctattcattcatttgaaattagttactatttattataagccagatacacagagaaaggcaatgggcctctcccccaaagacctctcagtctagcaagaaaacatgtaaacaggtcacttcaagtcagtgtgataaatgttatcacagaggtgcaggaaatgcttatgtaagcagagatgaaggagcaatttattctttacagaagtgaagtgggaagggtttctcagatataccttttgagctgcggagaggtatttattaaacccagtgtagtcacaatcaataaacattaacttaggacctaatttagtgccagagaatgggcagagcaatggcttcagggaaaagaaagcagtgcctgagctcaaggtctcagttgagtgaggagtcagacaattaacacagggtgtgatgagggagaataaacacaggggctgcctccataggaaaggcatcaacaaaacagaggggacaacgcccagagacatttccagcttgaccaagttttaaagggtgaatggttaatcaggtgaggacacacacacagaagatgggagttgggatacccaagtgtaaggattagggatgtcttgttgcatgccaagggagaaatatgagcacaggctgaaggtatgggagagcattttctattatgtgaactataagagttcagcacagggagtgaggatggagagatgaggctggaaaatacccatgaaggggctggaaatttaaacatggaagtgctgtaatcagatttgaaatttccactagacaacaatgctaccacgtgtgacccacttccaagaaaaatcttggagattttaagaactaccagcacattcactgcaaccccaccttatgttcccatccaagagaacacactggattgcagtaagatggaatccaatcttaatgattataaactgacttgaaatccctttgtcatgagatcaaagctgagtccacaatagctataaaaagaacatggatgagtaaaccaaagccctgtacggttaaaaaaaatgttcatgttcaaataaatagttagggctaaaggagatttccagaccagtgttttgtccactattccatttgtggaaagtcatataaagcaactcacccttctcactgccctgaggagtgtgtgaacttagaaggcgggcctgtaaaagaaatgcatagaggtctattctgtaagaactcaacatcagctaaacatggtcatcattaacatatttattcctcttaacagttcattaattctggagccttcctaattgcagtgaaaagaaaaaccacagaaactctggtgagttatattcttactttattaaaaatatattttgtagccagtcatggtggctcatacctgtaatcccagcactttgggaggccaagacgggtggatcatgaggtcaggagttcaagaccagcctggccaacatggtgaaaccccatctctactaaaaatacaaaattagccaggtgtggtggcacacacctgtagtcccagctactcaggaggctgaggcaggagaattgcttgtacctgggaggtggaggttgcaaggagccgagatcgtgcctgggcaacggaaaagactccatctcaaaaaaaaaaaacaaaaaaaagtaatgagttacattttcactatttccactttattaaaaatatataactttcaaataatttatcctggccttgaaaaaaatttgtaaaatcattaggtcaccataattccacaaactatcaagtattaataccaataaacagcatttgcttcctgttttcctagaattataacccattatgctagaggagaaagtttctctaggtcatctagtttagctcttattttatgtatgaagacactgaggcttacaatcgttaaatagcttgtccaaattcccagccaattaatggtagaattatttcaacattccagttacttattcattcttttttgttttctgggtatttacggcataccaggcactttgacaggcactactttgactcatacgaaaggcaaactgtagacaatctaattaaaccataaacagaatctcaaaataaagaatacagtgctactgaatgtaaagttatagataaattataagtagaatatttttactttactcaaagaattgaagacataagatattactatgccaacaaaagattttagcaaaggactgaaaatccttagtttgtcattttagggagaaattaaaaatggcagagaagtgcagcattcagttaaacttaggagtcttaaaataaaaatgtaaacagaccatgactttcaccagaaaatcaaaatgcaattgttacaggcacacccttcctcccaactgaataagagttaacttaggcatagaatatggggaatggaaaggttactaaaagttcacaagatccccttattgtgtagatgaaggcctgaagcccaaagatgtgaagcaattcgcacaggatcacagagctgcctcgtggcattaagatgctgtgactaaaatcctgctctccattctccgcactcattgctttgtttgtagtacaggctggacctcagtcacattgttatgttcttattctatttcagataatattgagccgaataatgaattttcttagtgccctgggagcaatagctggaatcattctcctcacatttggtttcatcctagatcaaaactacatttgtggttattctcaccaaaatagtcagtgtaaggctgttactgtcctgttcttggtaagtatgttgcatttatagagtgatgagtaaagggcttaatagaaaatatttattagcactcaatcagcaccattcagatcatgttgtggacacatgtattttcttttactgacaaacatttatgaaatccataatatttgatagacattacaccaggcattgtggaagagaaaaataaacacattataactcccacctttaggaattcacaggagcacaagagataaaacatacacaaatcagtatgatacaaatataaatctaaaaaaaaaaggtacagcagtatggctgtagtttatagccctatatgtacattagaatcacagtggtgtgtttttacagttcttgatttggttttaacaggctgaacttccgataaagcatgataagattgaaaaggggcatttattttagctgccttcaaaataccactaagattagtgtaaaagaatgtaaaaggtttgatccacatggagagaaaaagagagttaccaaacacacacaaaaattgctgaggaaattgaaaacccaccatctaaggcaaagcagggggaagtcatattagaagatatttcttacagcagagcctaagaaatacttaatatttgaatgcaccaggtccacagaaagcaggactaaagagcagaaaatagggagactgattttggtaatggttaagtatggctatgtggattaactcttctctgaaaacagaagtctttttattaaaaaacaaaacaaccttaaagacattaaaaagctgaaaggtcagctggaactactagatcaatttttagatgaaagcctgcaacctgaaatttacaagtggaactctgaagagcatgaaagctacttatgccttcagacccatttgccagtgatgcttatttggaatccaatccctggcccatgtggactgaaagagaaagaagtcaaggtttcacatccactcaaagtataaagacttaagagagattttctccgtattaaactaggtctttgataggctactacgctcttcaggtaagggcaaaaagatatacaacgtaccctgccccaaaatagcaaagtcgctgaacaaagtttaaaaaggaaaagtatttgagaagtgtggccacaagccaaacaaaccccttgacaacctccttgcacgccccaatccccactgacctttgctaggcataaactggataaggcaagaatgttttacctgaatttggtcttggtatgtggtgcccctggtacctggcagaagcaaaaccgaagtctatctaggagaaaaacattcattaatcttaataaattcccatcaaattttccattgaaaattaacagtaagcactcaaaagaggcctaaaaagaaataagacaatgcgaataacaactaatagaaacagaacatagcaaaaaaaaaatcacctgtaaatttctgatactaagtatattagaagagattttaaaaccacaatatttatcatgttttaagaaataaatgaggggggaggagccaagatggccaaataggaacagctccggtctacagctcccagcgtgagagacgcagaagacgggtgatttctgcatttccatctgaggtacccggttcatctcactagggagtgccagacagtgggcgcaggtcagtgggtgcgtgcaccctgcgcgagccgaagcagggcgaggcattgcctcacttgggaagcgcaaggggtcagggagttccctttctgagtcaaagaaaggggtgacggacggcacctagaaaatcgggtcactcccacccgaatactgcgcttttccgacgggcttaaaaaacggcgcaccacgagattatatcccgcacctggctcggagggtcctatgcccacggagtctcgctgattgctagcacagcagtctgagatcaaactgcaaggcggcagcaaggctgggggaggggcgcccgccattgcccaggcttgcttaggtatacaaagcagctgggaagctccaactgggtggatcccacgacagctcaaggaggcctgcctgcctctgtaggctccacctctgggggcagggcacagacaaacaaaaagacagcagtaacctctgcagacttaaatgtccctgtctgacagctttgaagagagcagtggttctcccagctggagatctgagaacgggcagactgcctcctcaagtgggtccctgacccctgacccccgagcagcctaactgggaggcaccccccagcaggggcacactgacacctcacacggcagagtactccaacagacctgcagctgagggtcctctctgttagaaggaaaactaacaaacagaaaggacatccacaccaaaaacccatctgtacatcaccatcatcaaagaccaaaagtagataaaaccacaaagatggggaaaaaacagaacagaaaaactggaaactctaaaaagcagagtgccactcctcctccaaaggaatgcagttcctcaccagcaacggaacaaagctggatggagaatgactttgacgagttgagaggaggcttcagacgatcaaattactctgagctatgggaggacattcaaaccaaaggcaaagaggttgaaaactttgaaaaaaatttagaagaatgtataactagaataaccaatacagagaagtgcttaaaggagctgatggagctgaaaaccaaggctcgagaactacgtgaagaacgcagaagcctcaggagtcgatgcgatcaactggaagaaagggtatcagcgatggaagatgaaatgaatgaaatgaagcgagaagggaagtttagagaaaaaagaataaaaagaaatgagcaaagcctccaagaaatatgggactatgtgaaaagaccaactctacatctgattggtgtacctaaaagtgatggggagaatggaaccaagttggaaaacactctgcaggatattatccaggagaacttccccaatctagcaaggcaggccaacgttcagattcaggaaatacagagaacgccacaaagatactcctcgagaaaagcaactccaagacacataattgtgagattcaccaaagtggaaatgaaggaaaaaatgttaagggcagccagagagaaaggttgggtaaccctcaaagggaagctcatcagactaacagtggatctctcggcagaaaccctacaagccagaagagagtgggggccaatattcaacattctgaaagaaaagaattttcaacccagaatttcatatccagccaaactaagcttcataagtgaaggagaaataaaatactttacagacaagcaaatgctgagagattttgtcaccaccaggcctgccttacaagagctcctgaaggaagcactaaacatggaaaggaacaactggtaccagccgctgcaaaatcatgccaaaatgtaaagaccatcgagactaggaagaaactgcatcaactaacgagcaaaataaccagctaacatcataatgacaggatcaaattcacacataacaatattaactttaaatgtaaatggactaaatgctccaattaatagacacagactggcaaattggataaagagtcaagacccatcagtgtgctgtattcaggaaatgcatctcatgtgcagagacacacataggctcaaaataaaaggatggaggaagttctaccaagcaaatggaaaacaaaaaaaggcaggggttgcaatcctagtctctgataaaacagactttaaatcaacaaagatcaaaagagacaaagaaggccattacataatggtaaagggatcaattcaacaagaagagctaactatcctgaatatatatgcacccaatacaggagcaccaagattcataaagcaagtcctgagtgacctacaaagagacttagactcccacacattaataatgggagactttaacaccccactgtcaacattagacagatcaacgagacagaaagtcaacaaggatacccaggaattgaactcagctctgcaccaagcagacctaatagacatctacagaactctccacgccaaatcaacagaatatacatttttttcagcaccacaccacacctattccaaaattgaccacatattgggaagtaaagctctcctcagcaaatgtaaaagaacagaaattataacaaactatctctcagaccacagtgcaatcaaactagaactcaggattaagaatctcactcaaaactgctcaactacatggaaacagaacaacctgctcctgaatgactactgggtacataatgaaatgaaggcagaaataaagatgttctttgaaaccaatgagaacaaagacacaacatatcagaatctctgggatgcattcaaagcaggatgtagagggaaatttaaagcactaaatgcccacaagagaaagcaggaaagatccaaaattgacaccctaacatcacaattaaaagaactagacaagcaagagcaaacacattcaaaagctagcagaagccaagaaataactaaaatcagagcagaactgaaggaaatagagacacaaaaaactcttcaaaaaattaatgaatccaggagctggttttttgaaaggatcaacaaaattgatagactgctagcaagactaataaagaaaaaaagagagaagaatcaaatagacgcaataaaaaatgataaaggggatgtcaccaccgatcccacagaaatacaaacgaccatcagagaatactacaaacacctctacgcaaataaactagaaaatctagaagaaatggataaattcctcgacacatacactgtcccaagactaaaccaggaagaagttgaatctctgaatagaccaataacaggagctgaaattgtggcaataatcaatagcttaccaaccaaaaagagtccaggaccagatggattcacagccgaattataccagaggtacaaggaggaactggtaccattccttctgaaactattccaatcaatagaaaaagagggaatcctccctaactcattttatgaggccagcatcattctgataccaaagccgggcagagacacaaccaaaaaagagaattttagaccaatatccttgatgaacattgatgcaaaaatcctcaataaaatactggcaaactgaatccagcagcacatcaaaaagcttatccaccatgatcaagtgggcttcatccctgggatgcaaggctggttcaatatatacaaatcaataaatgtaatccagcatataaacagagccaaagacaaaaaccacatgattatctcaatagatgcagaaaaagcctttgacaaaattcaacaacccttcatgctaaaaactctcaataaattaggtattgataggacgtatttcaaaataataagagctatctatgacaaacccacagccaatatcatactgaatgggcaaaaactggaagcattccctttgaaaactggcacaagacagggatgccctctctcaccactcctattcaacatagtgttggaagttctggccagggcaattaggcaggagaaggacataaagggtattcaattaggaaaagaggaagtcaaattgtccctgtttgcagatgacatgattgtatatctagaaaaccccattgtctcagcccaaaatctccttaagctgatcagcaacttcagcaaagtctcaggatacaaaatcaatgtacaaaaatcacaagcattcttatacaccaacaacagacaaacagagagccaaatcatgagtgaactcccattcacaattgcttcaaagagaataaaatacctaggaatccaacttacaagggatgtgaaggacctcttcaaggagaactacaaaccactgctcaaggaaataaaagaggatacaaacaaatggaagaacattccatgctcatgggtaggaagaatcaatatcgtgaaaatggccatactgcccaaggtaatttacagattcaatgccatccccatcaagctaccaatgactttcttcacagaattggaaaaaactattttaaagttcatatgggaccaaaaaagagcccacatcgccaagtcaatccgaagccaaaagaacaaaactggaggcatcacactacctgacttcaaactatactacaaggctacagtcaccaaaacagcatggtactggtaccaaaacagagatatagatcaatggaacagaacagagccctcagaaataacgccgcatatctacaactatctgatctttgacaaacctgagaaaaacaagcaatggggaaaggattccctatttaataaatggtgctgggaaaactggctagccatatgtagaaagctgaaactggatcccttccttacaccttatacaaaaatcaattcaagatggattaaagacttaaacgttagacctaaaaccataaaaaccctagaagaaaacctaggcaataccattcaggacataggcatgggcaaggacttcatgtctaaaacaccaaaagcaatggcaacaaaagacaaaattgacaaatgggatctaattaaactaaagagcttctgcacagcaaaagaaatcaccatcagagtgaacaggcaagctacaaaatgggagaaaatttttgcaacctactcatctgacaaagggctaatatctagaatctacaatgaactcaaacaaatttacaagaaaaaaacaaacaaccccatcaaaaagtgggtgaaggacatgaacagacacttcttaaaagaagacatttatgcagccaaaaaacacatgaaaaaatgctcaccatcactggccatcagagaaatgcaaatcaaaaccacaatgagataccatctcacaccagttagaatggcaatcattaaaaagtcaggaaacaacaggtgctggagaggatgtggagaaataggaacacttttacactgttggtgggactgtaaactagttcaaccattgtggaagtcagtgtggcaattcctcagggatctagaactggaaataccatttgacccagccatcccattactgggtatatacccaaaggactataaatcatgctgctataaagacacacgcacacgtatgtttattgcggcattattcacaatagcaaagacttggaaccaacccaaatgtccaacaatgataggctggattaagaaaatgtggcatatatacaccatggaatactatgcagccataaaaaatgatgagttcatgtcctttgtagggacatggatgaaattggaaatcatcattctcagtaatctatcgcaagaacaaaaaaccaaacaccgcatattctcactcataggtgggaattgaacaatgagatcacatggacacaggaaggggaatatcacactctgggaactgttatggggtggagggagggggggagggatagcatcgggagatatacctaatgctagatgacgagttagtgggtgcagggcaccagcatggcacatgtatacatatgtaactaacctgcacaatgtgcacatgtaccctaaaacttaaagtataataaaaaaaaagaaaaagaaaaaggccattaaaaaaaaaaagaaaaaaaaagaaaggagataagccaatagttttccaagctgacttagaaactcgacaaaaaaaatgggtatatccttactatttgtcagcataacctaccttctcttattatctgtcagtctgaaatactcctcaataataaaaatgtcaagacttgaaaaaaaaaaagaaagaaatgataaactttaaaatacctcagggaatataaaataaaagaaagtgaactagaagattttctgtgtaaaactattatgtacccataaaaatagaaaattaaaaaatttaaaattttaaaaaaagatggtcccagtaaataagagtttaaaaaacaaaacacaactgcattctgtttacaagaaacagctacactagtaacaaacaaatagatttaaggcaagaagcattgctaaacgtataataggggactttctataataaaagggtcgattcacaagagaaatattacatttctaggtttgaatgctcctaataacaactcaaagccaaaaggaaaagctaactcagctgaatgagtagagaaagctaaaatcatcataagaaattttagcacacatttctcagcaactgaaagaatatgtagacagaccataaaattacagaattttgaatacaattgataaaattgacctaaatgtcatatatagaatgaacactacaccaaataactacaattataatactgtcaactgacatttttaattgacagataaaattatatgtatttatcatgtataacatattttgaagtacatatatgcattgtggaatgtttacatctagctaattaacaaaggcattacctcccatagttatcacttttgcagtgagaacacttaacattcactatctttgcacttttaagaatacaatagccatcattctcagcaaactaagacaggaacagaaaaccaaacaccttatgttctcactcataagtgagagttgaacaatgagaagacatggacacagggaagggaatatcacacaccaaggcctgttggggggtagtgggacaaggggagggagagctttagaacaaatacctaatgcgtgtggggcttaaaacctcgatgacaggttgataagtgcagcaaaccaccattgcacatgtatacctgtgtaacctgcacgtcctgcacatgtatcccagaacttaaagtaaaataataataaaaaaagaatacaatatactgtcattaactatgggcaccccgctgtacaacagatctcttgaacttattcctcctatctaactaactgatggaagtgataagacaatagaattacatctttaaagtgctcaaacaaaataatgccaacccagaattctaggcctggtgaaaatgttcttcaaaaatgaaagtgaaatagccaggcgcagtggctcaggcctgtaatcccaggactttgggaggccaaggtgggcagatcacttgaggtcaggagtttgagaccaggctggccaacatggtgaaacaccatctctactaaaaatacaaaaattagcagggcatggtggtgggcagctttaatcccagctactcgggaagctgaggcaggagaatcacttgaacctgggaggcggaagttgaagtgagccgggactgcaccactgcactccagcctgggcagcagagcaagactccgtctcaaaaacaacaacaacaacaaaaacacaatgaaagtgaaataaaaacaactgaaaaaattgacagatttcacttagaacattttcaagaattagccatgtgctgagcctacaagcctcaacaaaattcaaagaattgaaatcatatacagtatattgtctgaaaacaatggaattgaattaaatgtcaattttaaaaaggcaaaaaaaaaatccccaaaactgttttgaaattctaagttatacaaggctcaaagaatttacaacagacataaaaaaattaaaaacaaaataatagaaatatttatataaattgattacaactaaagtgtgcttagaggaaactttacgacctcaaaggcaagtattgggaaggaaaatagactaaaaagtaaattatctaaatattcataccaagaaattagattaaaaaattaaatttaaagaaaatgaaagaattgagatatagtattctataatagacataacaaagaatagagataaaaactaatgaaatacaacacaaaccatggataagataaaataaagctaaaatatggatgtttgaaaaactaataaaattggtaaacccctagatatttaaaaagaaaaaagagaaaacacaaactatcattatcagaaatgaaggtgtatcactatcaatacaatagccaagaacatatgaggaaattattaacataaaaattatttgatgcattagatgattgtttccttataaaacctacctaccaaaactatgcaaaaccacccgccatgactaacacaggaaaaaatgtatatatctgattgggcttatatctaataaaaaatcaaatacataatttaaaactttctctcaaaaaagaaaaagcaaagccttgcaggagcagactaatttcttccaaacatttagaaaagaaacaacaccaaactgaatactttcagttcacttcccaactcacgagtattcatgtgaggctgtcacaagtttgacatgaaaacataaggacattataaaatatttaaaaattacgggtaactctatcttgtaaactttgtgaagaaatctgaaataaaatattaacaaaatcaaattcagcataatatatgataatataccgtggccaagtcagtggatatcagaagtacacaattgatttcacattcaaacatcaatcagtgatacacctaaatgtgaaatcctaaactataaagcttgagtgggtgggctgcagggaacttaggagaatatcttcacgaccatggtagtagacaaagctttcttagataaaacataaaagggactaaatataggggaaaaataaaataaaatggactaccaaagcacagaaagggagaaaatttcctctctctatatatatctctctctcacaaaagacccacatccagaatatattaagcactcctgaaaatcaataataaaaaggccaaaaaaagattaagacttgagcaagcagttcacaaagaaagatagataaatggctagtgagcatatgagaacgtgctcaacattattaatcatcagataaatgcaaattaaaatcacaataagacactactccacacacaccagaatcattttaattaaaaggaccaccaataccgggtgttggaaggaatgtgaagcaactggaactctcatacccttttgatggaaatgggaaacggaaaatggttcaaccaccttggaaaactattgggtggttttttaaaaagttaatcatacacctactttatgtctcatgatatagacaaaaatgtttatagcagtcctattcattatagttaaactgataaggaactcaaatttctatcaacaacaaaatggctaattattcaaataatagaatacttctcagcaatataaaagaacaacctactgacacagaggagcatgaatgaatttcaatttattataccgaggcaaacaatttcagataaaaaataaacaggcaaatttaacacatgatgctagaaatcagaagggtggttgactctcaatagggtgggaggattgattgggaagggacacaagagaacctactggggtgataaaaatgtgatatatcttgacgtggaaagaaaaagagataaaagacatttcttcttttttttttttgagatgaagtctcactctgttgcccaggctggtgtgcagtgatgtcatctcggcttactgcaacctccatctcccaggttcaagtgattctcctgtctcagcctcccgagtagctgagattacaggctcatgctgccatgcccagctaattttttgtattttagtaaagatggggtttcagcatgttgcccaggctggtctcaaactcctgagctcaggcaatccaccagcctcggcctcccaaagtgctaggattacaggcatgagctggcgcaaccagccaaaatacacttctttatatataaactttgatatagttaaaaatggaaaatatagttttaaagcagataacagcaacattttcatgtgtttatatacagagtgcatataactgacaagaagtcaagaaaaaattttctttttaaaagataaagaatatgaggaaagaatttacaaaaaggaaactacaatggccaaacatacaataatgctccaattcactaatagtcagggaaatgtcaattaatttaacaatgaactaatatttacatcactagactggcaaaaattaatgagttataatttatggctggtatttatcactggtgaaaacaatgttcttgtatatcaggactagaagtgtgcaatgtcactgccattttgggaagcaaggatacaacatttacctacctgaatgataaacagaccttttaacccagatgtctatctctacagtaattaaaccacctgtatataatggtatatgtacaacaatgctattgcagcattgttcagaggggtaaaacaaacaaacaaaaaaacacagaaaaaaagaggaaatcaatcagttcctgtcacaaaagaataaatgaatgatgacaaactacaccatgaaatattaagtggccattaaaaaccatgtggctctaaaatagctcttcaatctatagttaaaatatagtagacaaataaggcttcaggagaggatgttaaccatattaacctttgcaacctaagtataaagtaaagctctcagaagactgcaaactttaactggtaagtgcaggtctgcagcctctgggctactgacaagatgtgtatctctatttgtgctcatagttgccaaaatacaaaatattttgaaggtcttttgctgtgattgaaaaaaacacaggtggggccgggccatggtggctcatgcctgtaatcccagcactttgggaggccaaggtgggcagatcacctgaagtcaggagttcagcgctgccaacatggcgaaaccccgtctctactaaaaacacaaaaactagccgggtttggtggtgggcacctgtaatcccagctactcgggaggctgaggcaggagaatcgcttgaacctgggagttggaggttgcagtgagccgagatcctgccattgtactccagcctggctgataagagtgaaactccgtctcaaaaaaaaaaaaaagacaaaaaagaaaccaaaaaaacggtgaactactagcgtatgcttcttatgtctctttcgctttctcttttactaagccaatagttttcttttttccctctttttcttttctatttttagttctttttcctgtttcttcaccttctttctttccccttcattagaccaccttttatatatgcatttctttgcattttatgcatttataaaatggactatttcctacatatataaatcaaaaatgtatttttatatgcctttctctaaaaagataatatgctatgctatgctatgctatgctatcccatgctatgctatgctatgctatcctatgctatgctagctatgctatgctatgttagctatcctatgctatcctatgctatgctatgctatgctatgctatcctatgctatcctatgttatgctatgctatgctatcctatgctatgctatcctatgctatgctatgctatcctatgctatgctatgctatcctatactatgctatgctatcctatggtatcctatgctatgctatgctatgctatcctatgctgtgctatgctatgctatgctatgctatgctatgctatgctatgctatgctatgctatgctatgcaatgcagtgctatgctatcctatgctgtgctgtactatgctatgctatcctaggctatgctatgctatgctatcctattctatgctatgctatcctatgcttaaatagatgcatactctgaaaatccttcactgatttgattcctaagcatcagatacacttgagatatttggggaagcttttattatctgggcatcactatgtcattataatcaggaaaaccgttactgtgccaacatcatgactcttcatttttttttcttcttcttctattacagggaattttgattacattgatgactttcagcattattgaattattcatttctctgcctttctcaattttggggtgccactcagaggattgtgattgtgaacaatgttgttgactagcactgtgagaataaagatgtgttaaaatattatgtagcaatgacttctgcttgtaagggaaagccaaaggacacatagaatcttaaggctgggaactctttgaagcaaaggggagtggctcaagtgaaggggttctggggacattttgactgataaagcacattctgcctcttggcaatgccatctgcacctctccccaaatcaaatggtcaccttggtgttgtcacctctgttagtcatgcattatttcaactaaaggacagcaatgtggtgttgcaaagataggaaccaaagcccaaggcctggggtgacccagtcatctaacttctctggttgatgacatctcctgttgatttcactaagagactccacccagtggctcctactccagtggtgtgtggaaagatgagctggttggtggaatggtttggcccataaattctacattaatgctgcaagatcatcaatgttaaagagctgatcaactagaatactaacaatagtaaaaataatgaaggcaaatattggtggaaccactactatattccaggcatcattctaagtattatataggtgttactcatttaatctcacaaaagtcctaggaggtgaattgtattattatacccattttacagaaaaggaaactgaagcacagagggggtaagtaatttgctcaaggtcataaagtttgcaatggcagagccatagtatcaacaggcagccggttccagaatccaaggtcttaattccaatgccaagcaaagtttggaaggaactactttcctctggattctcttagcagcttttgcattcaatctgttatgatatctcgtgttctgtagcctatggagtatactactgtaaacttgtgaaaagagaaataaggtcttagtattattacaaaaatagttttgaacttatagggcacctacaaaggtctcaaggaccccaggaaatccgagaccacactttgagaaccactaccttatatggtattgcctctcactggctgaatacctcctaagtattagaggtctcacctgtatcatctcacttgtcctgacagccctcagggtagatatgtcttttgtcatagtcataaaaattgaagctcaaagtggttagcttttctgagagcacaaaaggagcatgatttagaaagaggatttgagtcaagttccctaacttcaaatcccattatcctatgttgtttatggtatagaaaaaaaaaactcagcatactcaaaaaatgaagtaacaggctttcatttctactatttgctggcagcagcttaggttataggtgcatttgtgaaggtgacggatacaacatggcaggaaaaataagtaagttttttacttcagtgaagttaggttatgatgaaaaatacttggcaactgaatgatgtacagatgtgtgaggcttgagatatatttgagggtgcaaagtcttgggcttttaagtcaactaggtttaaatgttgtcttgaagtcaaaaaatagtagatgcaagttgtggagaaaagggaatgcttacacacttctggggggaatgtaaattagttctgccactgtaaaaaaagcagtttggcaatttctcaaagaactcaaagcaaaattactattcaacccagcaatcccattattgggtacatacccaaaggaacataaatcgttctaccataaacacatatgcacgtatatgttcattgcagcactatttgcaatagcaaaaacgtggaatcaacctaaatgcccatcaacagcagactagataaagaaaatgtggtacatatacaccatggaatactacatagccatagaaaagaatgagataatgtcctttgcagcaacatagatgaagctggaggccagtattctaagcaaactaacacagcaactgaaaagaaaatactgcatgtgttctcacttataagtgggagctaaacattgagtacatatggacacaaagaagggaacaacaggcactggggcctacttgagggtggaggatgggaggagggtgaggatcaaaaaactactattgggtactatgcttattacctgggtgacaaagtaacctgtatatcaaacccccgtgacatgccacttacctatataacacatctgcacatgtaccctgaacctaaaataaaatttaaaaaacaaagaagaaatgttaaaattattagaaataaagatagaagacttctttacaaagtcaaggtagtaaagaatttcttaaacagatcccagaacatgaatagtaccagcaagaactgatacaacccatttagtcgttattaagaatgttacataagtgtgacgagagcagctacaaatcaaagccttttagcaacacaaataaccaacaaaaataatgggatatagaatatataaaatcctcctatacattaatagaaaaatacaacttgatgaaaacttagtccaaagccatgcacagccatttcacaggagacagaaacaaaggttaatatatgaaaagcactcaatttcttaagcaattgtggaatgaaaggaactctcctaccacaatggtatgagtgtaaatgaagacaaccactttaaaaactattccctagtaaaggtaaagatacacatactttataacccaacaattccactgctagttaatatacgcaagagaaatccttgtacatgtgcaacatatgacacgtacgaatgtttccagagcaggattgcctgcaatacctcaaatgtccatggacagagaacagatcaattgtaccatgttccctactggaggaccacatattggtaaaaataaattacttgaagcaaatcaacaaagatgaattatacacatttaatgttgagtaaagaaagcaagtcacaaaagaacatcttattaattctacctaaataatgattagaaaacacaaaaactgctctctccctctccctctccctctccccgcagtctccctctcatgctgagccgaagctggactgtactgctgccatctcggcttactgcaacctccctgcctgattctcctgactcagcctgccgagtgcctgcgattgcaggctcgcgccgccacgcctgactggttttggtggagacggggtttcgctgtgttggccaggccggtctccagcccctaaccgcaagtgatccgccagcctcggcctcccgaggtgccgggattgcagacggaatctcgttcactcagtgctcaatggtgcccaggctggagtgcagtggcgtgatctcggctcgctacaacctccacctcccagccgcctgccttggcctcccgaagtgccgagattgcagcctctgcccggctgccatcccgtctgggaagtgaggagcgtctctgcctggccgcccatcgtctgggatgtgaggagcccctctgcctggctgcccagtctggaaagtgaggagcgtctccgcccggacgccatcccatctaggaagtgaggagcacctcttcccagccgccatcacatctaggaagtgaggagcgtctctgcccggccgcccatcgtctgagatgtgggagcgcctctgccccgccgacccgtctgggatgtgaggagcacctctgcccggccgcgaccccgtctgggtggtgaggagcatctctgcccggccgccccatctgagaagtgaggagcccctccgcccggcagccgccccgtctgagaagtgaggagcctctccgcccggcagccaccccgtctgggaagtgaggagcgtctcccggcagccaccccgtccgggagggaggtgggggggtcagtcccccgccaggccagccgccccatccgggagggaggtggggggtcagacccccgcccggacagccgacccgtccgggaggtgaggggcgcctctgcccggccgctcctactgggaagtgaggagcccctctgcctggcatcaccccgtctgggaggtgtacccaacagctcattgagaacgggccatgatgacgatggcggttttgtggaatagaaaagggggaaaggtggggaaaagatagagaaatcagattgttgctgtgtctgtgtagaaagaagtagacatgggagatttcattttgttctgtactaagaaaaattcttctgccttgggatgctgttgatctatgaccttacccccaaccctgtgctctctgaaacatgtgctgtgtccactcagggttcaatggattaagggcggtgcaagatgtgctttgttaaacagatgcttgaaggcagcatgctcgttaagagtcatcaccactccctaatctcaagtacccagggacaaaaacactgcggaaggccgcagggtcctctgcctaggaaagccagagacctttgttcacttgtttatctgctgaccttcccttcactattgtcctatgaccctgccaaatccccctctgtgagaaacacccaagaatgatcaataaaaaaaaaaaagagactataaacataatttgagtgtttagaaatttaaaaataaaatcccagtaaaaaaaataaataaataaaaataaaattaaaaaaatgcagtatgatattgcaatgattgagcattagaaagctggagaaaataaatactaaagtgtttgggagggtcacaataggcttcccagtaaaaattagaggaggatgtgaaagcacagcgtattccaaactttacagttgcatttacatctcttgaggtgaaagagaaataaccataaaaggactctggaactacataaagatacaagacaaattggtttggagaacggaaataaaatctacctataaaatccaggtaaatatctgatactggcacacaggttggagcagagaaagaggaaacatagaggtgccaaaggaacaaagtaagtccattgatacgttcttgcctatctctcctccaaatcaatgggcacaaactgtggctggtctacctgtgtgggttctgttctctagattggagggatgaagacaagttcttgactctatgttgaggccagttgaaaaatgagggagaataaaaccatgaacgaaacaagaaagaaacaaaacagaagaggaatgaaaaagtaagttggttgctgtacaagagataaaacggactgcaaaaagaaaaaaaaagctaatgctcgctgggtgcggtggctcacacctgtaaacccagctctttgggaggccgaggcaggagaatcacctgaggtcaggagttcgagaccagcctgcctaacatggtgaaaccccatctccactaaaaatacaaaaattagctgggcgtagtggcaggtgcctgtaatcccagctactcggggggctgaggcaggagaatcacgtgaactcgggaggcggaggttgcagtgagccgagatcgctccattgcactccagcctgggtgacaagagtgaaactccatcttaaaaaaaaaaaaaaaaaaagctaatgctaagaaaggtgaataataggttcaactgtatgccattccatgaacatgggcccaaaaggacgaggccatgccccactgggcacttgatgattatgtggctaccacagggacaacatagaacacagaagtaatactggagcccttggctttgtaacacattttaattaaggtacttctttctgacaagaaaacaattaaaattaaaataggtagggaaagaacattcattttcaccagatcagcattttgtgaaaggtgatataagtgtatacctgtggatgtactgggtgattttgtgaaaatgattcggtttcatgttttgctttatgctataaagtactcttgaaaataataatcatcttcactctgtcaaaagtgaagttagcatgaaaatgaggtagaaagaaactataaagaagtaaatttttcccatttttatttgaaataatgtaatcacagagcaaattgctgaggttttctctaattgctttagtcttatacttttgatctcatcagagctccaatatttttatgtgttccttgttcttaaaaataattgcagttgttctaattcttatttttaaaaaaaggacaactaggggtaaatattttgtcaactgtcaagagaacaatcctactaagtcaataggtggaatctataaaaggagtctatttattagtttcccttctcatgtatcatttacagaattgtcttcatttcaattgaataattaaagaatcagaactggctggctctgtctttaattccttttataaaaccagaacttgacccagtaaaaatgtattctgagtcctaataactatagacctagccatgaataatctgggttctatgtgaaatttacagatcttagtccagaaactaaacagcagatatgaaaggagaaactgttgataaataaatgaaaagtattgagttttcctcataaaatttctcgagacaaaaaaaaagcaatgatcaacagcaaaggagaatgtaatgaaatcatatacatgcagaaacgtggacaattctttaattgtatgctttttaaaagctcaaaaaaattcttgttctggttaattactgtactctgagtacccatctcctatttctttgctcttgaaattgaccctgttcaattccttttataaacttttcctatggccacatccactgcctaaaacaagatagaataccttgggatctaataataaaataatagttcctttttaagctcttgccatgtgctaggcactgttccaacagttttgcataaattaggataatttgaactttagactagcctccttaggtaccttctgtcattttacagttgagacataggaactaacagggatttcattaagaaacttgcttaaagtcccagacttagtgaagtagcagattgaagattagaaaagagggcttgagcaatatttggccaccgaaaccagatccataggatgtataacctcacattctcaaatgctattgagagttacgtggtgttactccaagagtcacagctatggacttgtttcctttttccttgtttaaaataaacttttgtgggctcaaatgtgtttacatttttttttttttggagatggagtctcgctctgtcacccaggtgggagtgcagtggcacgatctcggctcactgcaagcatccacctcccggggtcacaccattctcctgcctcaaccttccaagtaactgggaatacagggggacacccctacacccggggaaatttttttttttttttgtatttttagtagagacggggtttcaccatgttagccaggatggtctcgatctcctgacctcgggatctgcccgcctcggcctcctaaagtgctggatgtgtttccattttgaaaaaaaaaattcctctgtaatcagatatttcagaaagatgttttctcccttttcattgagttttcaaccattttcagttgcatctagtatcggagggtaagggttatgagtacaggttctggattaaattctctcattgtgaaatggggattttagtagagtacctatctcatggggttctgtaaagggtacagagataatgtatctcatgcacttaacatagaaataataatagagccaaccctgtaatcggcacaattccacatactttgcagagaataactctttaatactcaaactgactctctaaggaaggtagtcttattagctctattttacagacagaaaacaaaggcaaagagaggttaacaaacttgccaaagacacaaagttggagttagatcccaagttcatgttcctaaacatgacactatacagaccctactgtgcctataataagtctttaataaatgttagctctctatacacctcacctaaagcttgctaaagagaatccttactaactcactcaatcacaaagaagttaatccggtttataaactcctctccatggcatcagaagacagaagttttgttgttgggtagttgcaggagcagagtcaataccctgtcaccaaggctggcctggaaaacaagctgcaaatgtccagagtgatgctgcatggagggggattctgaaccaacagccaagaatcccattttcaagtcctaactctgccacatgttttctgtgtaaccttgagcatgtcacttaacgactcagcttcaatttctcatctgtaaatcaaggggaatgagacaggataaatggaaagggtcttttctaccctaaaatttctggattctatgagcacagggtctgcatatgtgtccttgttagataccagtgatacattgtaccaataggttattcatagtattcatacttcataccaagaatgagacattcatcactctaactttcttgatattcataagcacaagaaaattgttgtgcttttgaagacctcaaaaaaaggaatctaaggctaaagacaaattttttaagtgtcataatttttttcaagaattaatagtcattgttgtccatattcagttgtactggcttatttccaacaaaatttcccttgcctacatggggcctgagatgctctaagctttcagaaggacagaaatgaataaaagcatttttcctaaagaacagaagaatcatcttaagtgggcatatgtgaactatctagtttcccaattactggcaaacaattttaatcttggactgccctccttgccatacaagtattgtattacttggcccctgtattagttttctatttgttgatataacaaactaccacaaatgtagtggcttaaaacaatataatttttttatctgacagttctgtaggtcagaattccaataccagctcactagactaagttcaaggtgtcagcagagtcatgttccttcctggagactctagggaagaatctgtttccttgtttcatccagcttctagaggcgacccatacaccttggttcatggacgccttcctccaacttcacagttggcagcatagcatctctctaatgagggatggtttcaggatgaaactattccacctcaggtcatcaggaattagagtctcataaggagcatgcaacctagatccccaacatgtgcagttcacagtagggttcatgctgctatgagaatccaatgccatgctggtctgataggaggcagagctcaggcagtaatgcttgcctgctgcttacctcatgtagtgcagccaggtttccaacagaccacagacaggtaccagtccttggcgtgggggttggggacttatgagaatcatgtttctatcagttgttatggcccattatctgctcacttgttctctccatttgcatagataattgacatttgacatttggtaagattttctttagtttcttttctggataaacgtatcacttttgtatgttttgtgatacttaggacataatgatgtcatccaagccaacaagccatgctgaagtaaatgaaaccatacccaacccttacccaccaggcagctttatggctcctggatttcaacagcctctgggttcaatcaacttagaaaaccaagctcagggtgctcagcgtgctcagccctacggcatcacatctccgggaatctttgctagcagtcaaccgggtcaaggaaatatacaaatgataaatccaagtgtgggaacagcagtaatgaactttaaagaagaagcaaaggcactaggggtaagtctatttactaccagaattttaatttcacattgcaaggtcttcttataagttataggagagtatcatccaattgctaaaaagttctgaacgttattctgaaattatctcttttagacagaaatatttagtctgcctatagactttcccttgagttcatttcattttagatcaagcaaaaatataacaagacacagaggagcctccctagctggagaatttggtaatattgacgtgacagaagcactgttacatctagcttgatctcatttcttcaaaggactttttggacaatctcaatcccatctctggattagttacaagtctggtttttgcataaaggtgaatttacataacaatgaacaatgatggctgcccccagaaaaggaaactacaaatgggcagtctgggaaaggctgagtgtgaaagaattgggggacattccatctgctatgcctctttcaccaatacccttagagatgctacagtttaactgtcaccttacttctacaaaggagactctgaactgactgccttgtttctgtaggcattgtaaaaacaaaaatgccctacttgtaagaaaattccacctgcctaggtagaattgttagtcccttctccgtgctttccaaatacatcattcatcccgctagcacaattccaccaaattatattaagtctctccctgtgaatagctcaaaatgctctgctggagcattccgtaaatgaatgctcattatgtgccagaaactcttctagccatcttactatgtatttcaagttgtgatgttttagggaagtaaaaatgagcataagttctcctgcagcagcctatttactaagctgtggaggtggcccttctgatcctcctcctcccagatagaggaaattccctgctcctaataagccaatgggacaaactaacaccccatacagccagccccacacaggtgcttggaatatcattaagcacaaaggaggtgcaatctctgccctcacagaacttacgccctagagggggaaatcagactgtatacataataaggaagtaaagtacttagtgtgttagaaggtgtcgaatgatatagacaaaacaaagaagtgtaaaagggctaaaaagtactaggcagtgaggaggcagcaatttcaaggtggtcagaatgggctttccttagaacatgacatttgagcaaaaacctgaagttaggagtgagccctgcagatattagggaaagagaaaacaaccagtgtaaaagtctttagatgaaaatgtctttgaggtatttgaagaaccgggaggaggccaataaaatagaacagaatgagtgagggagggggcagttgtcaggagggcagatgagtggcagaggccacaggtggtgaggcctgcagagcagaaggctttggctttgactgggtggatgaggaaccactgaagcatgctgcccggcaccgaagaggcgtgtgataaaaatactttaaaagaatgtgaagttttgttttcaaaatctccagttggcagaagctacttcctctctctgaagatttgttatttctatgccatcagcaggccctgggcatcatgacagtgcaggggccacaggtggcaggacttggcacacctgtaccagtcaactcagaccttaaagtgcttctgtggccaaaaatgcagacaaattgtatgtccaaatttttaagtctgtcctataggcaattttgatcagtagatggtacagccagggctgtaggaggagaaatgagggccagtacaaatccagatctaactgcccctcatcaaggtgacagcaaggatgagaatgggaagtttgtgaccagacggctgaattgctgctctaaagaacagttgtaaaaaccaaatataaagtctaatacaggagttctttaagtgagataggctaaacgtggcccatcatctctctgaagctataagcaaaagtatggtatgtgtgtgtatgaatgtgcaagaataatttttcagggagaaaggttcatggtttttattgatgtctcaagaaacttttagcattgtttatgaaactgggtttttttctaattttaattcgatttacttgtgttcagtagctatttattgaagaaataaatacagcagtctttgtatttgcagtctccctggatagataagatgtaaccatggggaaaaataaattacaaatctacaatcaagttttggaccaatctagaaatgattattcctcagaaatctatctttatttacaatgaaggaaggttcaataagaggtacaaggaggtaaaagatgtataccttacttttagtaatatatgattgataagaagaatgattggtaagaaaatgattgcatacctgcaactttttaaaaaaggacaatatacactttgggaggccaaggcgggcagatcaagaggtcagaagatccagaccttcctggctaacccgtgaaaccccgtctctactaaaaatacaaaaagaaattagccaggcatggtggcgggagcctgtagtcctagctactcgggagggtgaggcaggagaatggtgtgaacccgggaggcggagcttgcagtgagccgagatcatgccactgcactccagcctgggcaatagagcaagactctgtctcaaaaaaaaaccaaaaaaaaaccaaaaaaaaaacaatataaatgaatccaaaatcaagtaataaggtgtgttttatgtcatgagatgcaactgaaattcagaaagaaagaaaaaagattaatttggtgtaatcaagaagacttcatggaaaaggtagagcagagctgagcatgggggaagacagtaccgaataattcagacaggctcagcagtcaatgtgctgcagtaaattcccagatctgcctcttaggaattgtgtgaccttggatacctgatatctttatgtctctgggactcaatccagttgtaggaggattacatgaaacaataaatgtaaagtgttcagaacatgaccaagcacataattcatgcctaataaatggttttatcttcaccaattcctttacccgtaactgggatgacccaagcagagaactgatccatctgaaaaagcagctactgacatcacagttaaagtattgtttttctaatagtcttttagaggccctcagagatgctaatgcatgattaagcagctgtactttctgaagaattcttcttgggccaccccagtaaattctccaaatacctcaaaacagggcgtttcactaagggccttgcactccagttattctagtatatgtcagaatcttcatgacccacctcctgcttcagatgtgtgcctgaatgacaacgatggatctcagcaaaattgacaataaataagcaggggcagcaatgacagtaatgtttcacacgtctgaaagtgaagaagtaattttaaatggctgttttcttttttcaggtgatccagatcatggttggattgatgcacattggttttggaattgttttgtgtttaatatccttctcttttagagaagtattaggttttgcctctactgctgttattggtggatacccattctggggtggcctttctgtgagtagattgctagaacaccagtccttcttggtttataaagtattccctcttggtttataaagtattgctatctccagccaattcacaactcatttcttgataaagccctacatctgagggctggagaatttagaaaaattaacagctctgaatgagggctggagaatttagaaaaattaacagctctgaatgagcatgaaaaaatcgggaactctttcgccattttacctaggagcttattccattctttaaaatttaatcatgtaatcagcaagccaaagttttgatatcctactacatttgagatggaaatgtatgtattgggtggagagagaaagaaaagaaaaggtgattggaaacatgattaaaaatatgcaagtaagccaggcatagtggtgtgtgattgtagtcccagctacttgggaggctgaggccagggaattgcttgagttcaagagatggaggccagcctgggcaatatagtgagactcaatctctaaaaaaattttttaattaaaaaaatgcaattgattatgagaagggatggagcagtaagcctcagaacaaggaatgcttaaacattgtgagttcttcataggccagaaattaaggaaaagaaaataaaaaagaagtcaaggacatatgactgagagttactccagaaaattcagaagtgcgagagaaaattttgagaaggaaactagatgaacataaatagaccaacctttcatataaagagaaattcccaagcacaaccagttaacccatttcacaaataaatttgtccatttccacagtttattatctctggctctctctctgtgtcagcatccaaggagctttcccgttgtctggtaagttagactgtctctactttttgaacccctttaaagattagcttaacatattggggaggaaaattgaaaagctggatttgggaaatgcaaaagggagcacctttcccaaaaaaaatctattggttgccttatggtctgagcgctggggtgagaaaatggtccacacagtttgccactaagaaatggcagagctccatatcctgactcttgaattcacaaaggtgagaagtagtaaaaatcagggttgtttaagctttaacctaaaagctccctggttcagtctggtcacactctattatgggaagtccaaaggagaatccaggagccaggaaatacatactagacacatcagttaccaagtctctactgttcatttgccacttctcagctctgtcttgtatttttatttttttatttgtgctatttcctactcttacacaggttgtgtgttttacaattctttaaattgccattaaatgagtctagcttgttctgtaagaagagtttataaaaatgatgagtaagacaggactttgagctctgtcggtcacagcaccccacctattccaatttcgtggtctactattgaaccaggaaaaagaaagtgatttatcaagaactagagtcaactagagcagaggtggtgtcaagattatatgtaatccagtacaagaaagaagaacggggaaagaggaacacagaatcatgtagctcatgctcttgcagacaaagaagaataaaataattaaatcaaattaaaataaaataagcctaattctgattaaccactcctgttgcagtccaaaaacaaaataaagcaccctttctctgcatcttttaaggatccttccgtctaattgagattgtcgaagcatagattccacctcttagaggagacagccactgacacatacctaagacaatttttctaagagcttttagagaacttcaggaggctctaaggcacgctgcagcacaagcacattctaaagaactcgactgtgccacccctagcaagtcacctgcggacttggtttcacaattattcttctgcatgttaaaatcctattgtagaaactggggaaagttttgtagtcgcccatacacctctgcccacaaaagcctaaattttctccttctaaatttgggggttcatatttagtccccagagagacttagggttttcattaattcctaaatttttcagcaaacatgttgtgtctaaatactttcccatctataaaatcatatgctatcgtactacctcattcaaaggctgtaagagttgagataatttaaataatttaacacagtgtctgacacagaaaaatgctcattagaagtttgttttttcatttttttataaagaaaatatagttgttattgtgcatgaagcttttagtaaaatccaatagatgagtgcctgctttatatgatttacatttttctacagctttttagaagtaccctacatctaggctgcatacagaataatgtttatggtaattacccagaagggcagaaaacagaataatttcaacttgaaaaattgttttgaaagttcaaaaattaagaaccatgaaatttgattgattcttatctcacttaacttcagtgatcctgtatataattgattttttcctgccatctccattaggtgaaaggcagcctgggaatgaacattgttagttctatcttggccttcattggagtgattctgctgctggtggatatgtgcatcaatggggtagctggccaagactactgggccgtggtaagtatcccatactccaccatgtgcctgctctattttcagtcccgtaaagtgggtctatgttttatttcttaataccgtataccagctctagtggaaaatgttttttctattctagccccacccctagtcatatgatctctaggactatagaataaagtgagagggttacctctacagatagaccgaggcttaaaggacatcctttattggcccatctcactgttaatcacatgaacaatggggaagggtttggataggcctccatggcttctaaaattgtccaaaaattattttcccaacatttgaaattctatataaataaggtagtcaagctattgagtgttttttgttaaacttcagagtaaagtatgaagtgagagggaaatgacagggataagaacatctgatttttacagagaaacccaggaatgaagcaattgctaaatgaagcacgtatctctgaatgtgctcaaaacacaatcacacattcattagccttatatagccaagcatggactctgaccttaagaggaaatgggtggcccaagggcaggaatgcttaccatctataaggaatggagcaacatggtataaaatgaggttgggctggaagctgtcatcctacctcaatggccacattaaccattttggtcttcattctgtgagcaatggaaaaccacagaagagtggttttattggtttcattttattttatgttggggttggttttgcttttgcttttcagtttacaaaaagcagagtttattaaattactgtgggctacatatatcttaagaaagacacagaatgacttccttatctatctagaacatattaacattaagacaatatcacaatattttgaacaaataaccacaataacatttcctttatcagttcactcaatactgtgtaagtaattctatttcactggatctcggagtggcaggcttatgaagccatctgcttctcaactaaagggttctgaaatcctgactccaaccattggtataatctgaaagttgtctaggcactcccatcagatgcgtgtcccctagagtatgttctttgaagtgtcagtagtttgaattgctggcacactctttttccaccaagctctgagacaatcctttgttaaaaacataggagagttttaggccgggaatttgaatgatcacttttgtgcttggaaaggacaacactgtttgcagtgtaaggaaaagcttatataagaaggtgtattagtttgttttcacactgctgataaagaaatacccaagactgagaagaaaaaggggtttaatgagcttacagttccacatggctggggaggcctcacaatcatggcagaaggcaaggaggagcaagtcacatcttatatggatgggggcaggcaaaaaaaatagagcttgtgcagggcaactcctgttttttaaaaccatcagatctcatgagacccattcactgtcacaagaacagcatgggaaagacccaccccataattcaatcatctcccaccaggttcctcccacaacaagtgggaattatgggagctacaagatgagatttgggtggggacacagagccaaaccgtatcaggaggcaaaaatagatgagaaagcttctcggtaaataaggcagagtgaagcaagaacaaaattcaccctccaaaataccaaacaaaagaacaaaaactattcaaaaaaaaacagctttcaaactggcatccaagtagagaaacaaatcattctgatgctactcaaagctgaaaaaaagcacagcttttagacctggctcttgtttccctacaaacaaaactgaggaaagaagggaagccaaaaaaaaatactgagaagtctcactaacactctccagtctgtagctgagaaggctggggtggagagcagtcaattctgtgaaaggataaagcaaatcctgtatggtacaagaccatgagtagtacccaggacctcaggagacagaagaaagggcaacaccttcccataccctgcatggtaccctactaccagcagggaatgagcagaaatgcacaggaatgcacaggaataaacctccagccaaggagcaggcctccatactaagcatttagcaggctctcagaagacagaaaaagtgaagtccatcctcgctagcaagaactgtgctcgaagccagctaagctatctctctccctgcaacagctatatatgttcacattcagaaacatggatataaaacaaccgctagggctcaagttgtaatggaagcaaggaagacaaatgggagccaaataaacagaagtgtcaatgaaggaaaattcacctacactgtacctgatcaaatagaaagcctgtatagagttcaagtgagcttaatacttttatttaaaatagaaataacatgattccattcttatagaatgatgctcctctctcttggttattctcttttttccctctcacggcatctttccacacatccattcttctgccttttccctgtacacagagagctaggataatagtcatcaaacattaattttggttatttctaaacactggcatttggaatgatccgttggtttctgtattgcttgacttttttaatgagtagtaacatttgtattaaaaaaaacaacgaggccatcacaaaggaaaaaaactaccttctttctaatatttctaaacaaaatagcctacttaccaaaaggaaagacttctggcattttaaagaaaatccaaaataaattcacactcctctggaacaagcatttgatgatactggaagaataagcatggagcgagttgagtataagcaatagcacatttgatgagtcaataactttttgaagcccacgtgaggccctcctgattagccaaaatttcactatttatttatgatttcactttctggaaaaggcatttcagccacgctgatgatcttctccctcttggagttcttcgtagcttgtgccacagcccattttgccaaccaagcaaacaccacaaccaatatggtgagttgggtctcttctttgtaaaataatctgaaaatgccctggagaaatacagacttgtgtctgctaaatcctactatcggcttaccagaatgctctttgtccttcactctgatggtaccaggggaaattgcataggattgtagtaaccatattgcttgtttttattcattctttccagtctgtcctggttattccaaatatgtatgaaagcaaccctgtgacaccagcgtcttcttcagctcctcccagatgcaacaactactcagctaatgcccctaaatagtaaaagaaaaaggggtatcagtctaatctcatggagaaaaactacttgcaaaaacttcttaagaagatgtcttttattgtctacaatgatttctagtctttaaaaactgtgtttgagatttgtttttaggttggtcgctaatgatggctgtatctcccttcactgtctcttcctacattaccactactacatgctggcaaaggtgaaggatcagaggactgaaaaatgattctgcaactctcttaaagttagaaatgtttctgttcatattactttttccttaataaaatgtcattagaaacaaaagcctttttcagtatgtttaaaaaattaattttgatttgatattggttgtagagcagtagatctgatctatactccaagaagattgataaacctttgatgatgatttttctaggtgtccagtcactggagttccctaactcatctcctcctcatctttctgttcagaaagcaagtgtccaattgcccttgttggaggtcatattattctatacattaatatcatcaaacatcttgcctcttaactatcatctacaaaattttgctatttacagagtattttcatgtacattaaactcacctgcaatgggacaacagtcagacagggatgctgcattgaggggttttcatttgagttttggctttttgtttttgaattgttggcacatttataagccaattagaacaatcaaggtaagacagaagggatgaatgacagtgtaagtttcaagaaatcaaaagcacagatggaaaacatcacctaagtcatgaaaaagggcagtttctctacaaaatagaaaggtataattatcacagatatccacagctttgcaatagtggcagtgaggatccgatgtgatggctcatgtcatccctgtcaaagcagtagtgatgtcatgcctaaggtaagggcacaggtagagtcagaatgttgaacagaatggtaacaagggaaaagtcatggaactggagaataaagtggtcggagaaacaggattgccaagcggtacagaaggcacatttgaggatgtggtaacaaattcagagtatggacaatgcttctgcaaggccttgctgctagatccaggcaactacggatccaggaaactatttgattttttccagggttaagattttgctagaggagatgacaaaatagcagaagagcaagaaagcttaggacattgtaaaaaatattatttaaatgatggactgtggaatctaaactggataaggaaggaataatagtaataataaaagcaataataaagaaaaaagacagattgatcataaatggagaaatctgccttttctccgggagctgtcgtgacaatcaaatgagataatgttatatgaatatggtttaaaaatagcaaagtattgtccctttttgaaattttaatattattaaagaagccagaagggaaaaatataacaaaaagagtaggcagagaaatcaaaatcagggaagaggaagattagaagaacagaatttttgcatctgggaaagcagatgtattatgtcaggcaagagtcacataatttcaacgtcattggtctgcctaggtcccaactattcagcaactgggtgattggaaatgctgtgtccttcaccataaagctcaacagctcagcaaaagtgaagacaaagatttcatggtctaagggtctggaaaataaatggtgcctcaaaatgtgggggaggggatggtatattgtatatctatacacgtaaaataaacaaatataaaagtcacttactttagggaacagaagcatttccagcaagttcattttttaagtaaatttctatcaaatatattctatttttcaaattgcttaataatagtaataataacagcatatattttagcccattccttgtaccactcacgttccaagcactgtttcaatgctcatgacaaccacctgtgaggcaggtggatcattttcagatgaaaaaactttggcagaaaagttaaaaatcttgtcctaagatatgtagctagcaaatggtgaagcatggatttgaacccaggcagtatgtttcccaggtccgggcagttgccctaaccattattcccactattcttatggtcttggatagaatcagacacttgtaatgccaaaacaaacagaaatgtttctctatagtaagcttgtaataaatttggaagacattgccttattctctgagagaggagatttagtaacataataatacagttgacacttaaacaacatgagtttgaactgcgtggctccactaatgtgcatattttttcaatgtgggaaaagtcatggaaacggagaataaactgatcagagaaacagaggattaccaagctatactgagggtacatttgagggggttttagcaaatttatactatgaacaaatttctccagctgggcctgtgatctgagaccctagaaggtgactggaatagaaatatgatattgccctctccctctccctccccctccccctccctcatgcccagccgaggctggactgtactgccaccatctcgactcactgccacctccctgcctgattctcctgcctcagcctgccaagtgcctgggattgcaggcatgtgccgccacgtctgactggtttttgtattttttggtggagaccgggtttcgccgtgttggccggtctggtctccagctcctgaccgggagtgatctgccagcctcggcctcccgaggtgccaggattgtagacagagtctcgctcactcagtgctcaatgctgcccaggctggtgtgcagtggcgtgatctcggctcgctacaacctccacctcccagctgcctgccttggcctcccaaagtgctgagatggcagcctctgcccggctgccaccccgtctaggaagtgaggagtgtctctgcctggccgcccatcatctgggatgtgaggagcccctctgcccggctgcccagtctgggaagtgaggagcacctcttcccggccaccatcccgtctaggaagtgaggagcatctctgcccggccgcccatcgtctgggatgtggggagcacctctgccccgccgccccgtctgagatgtgaagagcgcctctgcccggctgcgaccccgtctgggaactgaggagtgtctctgccccaccgccaccccatctgggaggtgaggagcgtctctgaccgccgccccgtctgagaagtgaggagcccctcggcccagcagccaccccgtctgagaagtgaggagcgtctccgcnnnnnnnnnnnnnnnnnnnnnnnnnnnnnnnnnnnnnnnnnnnnnnnnnnnnnnnnnnnnnnnnnaaaaaaaaaaaaaaaaaaa

SEQ ID NO: 80 - DNA, 95109 bp, Homo sapiens
  genomic_DNA (1)..(95109): n is an undetermined nucleotide (dATP, dCTP, dGTP, or dTTP)
  misc_feature (1)..(2): n is a, c, g, or t
  misc_feature (24657)..(24657): n is a, c, g, or t
  misc_feature (24665)..(24665): n is a, c, g, or t
  misc_feature (24667)..(24667): n is a, c, g, or t
  misc_feature (24669)..(24669): n is a, c, g, or t
  misc_feature (24671)..(24671): n is a, c, g, or t
  misc_feature (24673)..(24673): n is a, c, g, or t
  misc_feature (24675)..(24675): n is a, c, g, or t
  misc_feature (24677)..(24677): n is a, c, g, or t
  misc_feature (24679)..(24679): n is a, c, g, or t
  misc_feature (24681)..(24681): n is a, c, g, or t
  misc_feature (24683)..(24683): n is a, c, g, or t
  misc_feature (24685)..(24685): n is a, c, g, or t
  misc_feature (24687)..(24687): n is a, c, g, or t
  misc_feature (24689)..(24689): n is a, c, g, or t
  misc_feature (24691)..(24691): n is a, c, g, or t
  misc_feature (24693)..(24693): n is a, c, g, or t
  misc_feature (24695)..(24695): n is a, c, g, or t
  misc_feature (24697)..(24697): n is a, c, g, or t
  misc_feature (24717)..(24717): n is a, c, g, or t
  misc_feature (24719)..(24720): n is a, c, g, or t
  initial_coding_region (60039)..(60257)
  coding_region (62556)..(62678)
  coding_region (66166)..(66225)
  coding_region (67828)..(67959)
  coding_region (74200)..(74313)
  coding_region (74489)..(74590)
nngtttcaaattcctgggctcaagtgatccacccacctcggcctcccaaagtgctgggattacaggtgtgagccaccacacctggcccctcataaactttttgtaaagcgtcaatagtttatgaattcattagtcttccacccgggctttgacatcaattttatgcttgttctttcttcaattttagcagaattcatgtttctctggtaggggctcttttcaaactgacttcttatccttctaagtgcctcaaactaaatcctgttaagacatgttataacaattttgtgtgagtttattttggtgcaaaaattttttgaaatccgtgcgtagtttttccatagtatgcatttcccacaaactttttgaagaccccttgtattaggttgaaccatttgaaattgctgatatcagaccatttttaatctacaaaattgtcagtattgtatgatccaatccaatgtattagactattccaatatatgcaatttggaatatgatccttgtgaaatcaagaggaaaataataacatagatatataggttttagaatactatgaattaccaatattgacacagtttttgcactaagtttcctgataggcaaagtgaaaatgaaattcaatcattatgtgaataaattatctattaggcagaaatgtttcagttcattatggataaaatgattcctgtaatagtactttataaccatttattcgtgtatagttcagtataataagcagtatataacagtatataacagttatatatatactgttatatactttcccccgttctataattaaaaattagaatacatggcggggcacggtggctcacgcctgtaatcccaacactttgggaggctgaggcaagtggatcacgaggtcaggagattgagaccatcctggctaacacggtgaaaccccgtctccactaaaaatacaaaaaattagccgggcgtggtggcaggcgcccgtagtcccagctactcgggaggttgaggcaggagaatggcgtgaacccaggaggcggagcttgcagtgagctgagatcgggccactgcactccagcctgggcgacagagtgagactccgtctcaaaaaaaaaaaaaaaatagaatacgtaactctggttacattttctgtttggagatactgagcattctcagtctggatctggttgtcttgagttaaggaattatttcacccaagaaaacttccaggagtggtgacagattctccaaagtagacataataagcaagatggatgcaaggaggaagcataggttgatagcgtaatattttaaatgctgactcaaagaaatcattatttcattactaagagtaaaattagcgtgaagtataagcagccccatagcctagtcttctctagatcaataatagttctaaacatactgtactctaactacattatttctgagtaatttctcctgaatgaacacttgaaatttgcataacctgccattagagagaaggcatacttcaattatccatattcttataaagttgagactgcataaactaatgcccactaggttaacacgaaatgttttaacaacagctcagccttcagttttctagaaggtccagtttccaaaaaattatagcattctttatgcctaatgtcctagctacaaataatgatactgcatagttttttcacaatatgaattttatgaaatattttactgagattatctcattagatctgttaaatctctaccctatttttatttcctttatctctacactctactctcaaatatctcccttcatgaggaaccattcctttgtatttaatataaatggttttttaaaaccactttttaattttaagctactttatatgattaatacataaaaatgtatacatatgtaatgcatagatctgagtgagtttggggataggtatacacctatgaaactatcaccaccatcaaggccataaacacatttatcacatcccgaaggttcttcccacaccctttattattattgctttttactttttctttgggtattaacatttaacacaccgctatccccttagcaattttaagcacacaatacagttttattcaccacaggcactatgctatagagtagatctccagagcttagttattttgcataactaaaatgttgtgacttttaaccatcatcttcccatttatccctcccacaagccactgacagctactattctactctctgcttttaagagtttggcgattttaggctattatctaaaagaaaaatacagcagatgctggtgaggttgaggagaaaagggaacacttctacactgttggtgagaatgtaaattagttcagccactgtgcaaagcagtttggagattgctcaaagaactttaaacagaactaccatttaactcagcaatcccattactgagtatatatccaaaaggaaataaatcattccaccaaaaagatatatgcattcacaagttccatcacagcactattcacaatagcaaagacgtgaaatcaatccaagtgcccattaatggtggattgcctaaagaaaatgtaatatatacaccatggaatactacacaggcataaaaaagggtgaaatcatgtcctttgcagcaacatggatgcagctggagaccattatcctaggcaaattagcacagaaacagaaaaccaaatgccgcgtgttctcacttgtaagtgggagttaaacattgtgcacacatggacataaagattgcaacaatagacactaagactatcaaaagggggaggaagaaagggggaaagggttgaaaaagcatagtgggtacaatgctcactacctgggtgatggaatcaatcataccccaaacctcagcatcacccaatatacccatgtttcaaacctgcatgtgtacccctgaatctaaaataaaatttgaaattataaaaaataaaattatgtaacttaaaaaaatattgctgagatggataaatacataaataaaatggaaaaaaatttaagagtttagattccacatagtgagatcatacagtacagctatttgtctttctgtgtctggcttatttcacttaatatcctccagatccattcatgttctcacaaatggaaggatttctttcttttctaaggccagattacacacacacacacacacacacacacacaatttattcactcatccattggtaacatttagcttgttccatatctgactattacgaataatgctgcaatgaaaatggaagtgccaaatttcaaatcctttggctatatatccaaaagtgagattgtttgatcatatgtcagttctatttttaacttttctagggacctccatattgttttcaataacagctatagaatttacattctcaccaacagtgtgtaagtgttccctattcaccacatcctcaccagcacttgttatcttttgatttttaataatagccatcccaacaaatgtaagatgctatctcactatggttttgatttacatttccctgattattagtgatgttgagcacatttgcatatacttcttggccatttctatgacctcttttaagaaatgcctattgagaaagtcatggaataaacttaagtgcccatcaataaatgattggatttttaaaatgtggtgtgtatatacatattgtggaatactactttgctgtggaaaagaattaaatcatgtcttttgcagcaacatgaatgaaactgcggccattatcctaaatgaaatgactcagaaacagaaagtcaaaaaccacacattctcatttataagtgggagcaaaaaagttgttacacacggacatacagagtagaataatacaaattggaaactccaaaaggtgagagtgtggaagggagttgaggaatgaaatactacctattgggtacagtgcacagtatttgggtgatgagtacactaaaagccgaggtccagacttcaccacttacaatatgttcatgcaacagaactgcacttgtaccccataaatctatttttttaaattgcccatttttaaatttggttgctttattttttttattctgttgtatgtgtcctttgtatattttggatattaaatcccttatcagatatatggtttgcaaatattttctctcattccataggttgctttttcattgtttttcttactgtgtggaagctttttagtttgatgtagtcccacttgtttatttttgctttgttgcctatgctttacaggtcatatccaaaagacatcattgccaagataaatgttaaggatctttctctctgtgttttcttctaggagtcttagggtttcagattttaaaataaattactttattcatttttacttaatttctgtgtttgatataaaataaggctccaattcatccttttccatgttaatatccagttttactaacaacatttattgaagagactaccctttccccattatgtagtctttctgcctttgctgaaaattagctggccatctatgcatgggtttatttctgttctctctgttctgttccattagtctatatatctgtttttatgtcagtaccactctgctttctttactatagctttgtaatatagtttgaaatcaggaagtgtgatgcctccagctttgttcttgctcaagattgctatggctattcagagtcttttgtgagtccatacaaattttaagattgttttttctatttctgtgaagtatactgcttttgatagaatagacattttaacaatattagttcttccaatctatgaacatgggatatctttccatttatttgtgtctactttaatttctttcatcaacattttatagttttcagtgtacaactttggcatttccttggttaaatgtatgccagtgttttcacaatttttctctgttaaacatcattttgtgtgtgtttattgttttcctggttttgttaaattgtctctatgttctcttgcagctcactgatgttctttaagatgattattttgaattctttgtcatgcagttcatagatatccaattttaaaggtcaaccacaagagcttcactttgttcttttggtggtgtcctatttccttgatactttgtgttcctcaaagctttgcattactgtcttcacatttgaagaagcagtcaatgtttctaatctttactggttttcttcagtagagaaagaccttcacagtgagcccagccagagattcttggggcctcatgtactttttctataatgtgcacactctatttctcttgttccttcttagtgggcaagtctcaggattgtgtgccttctttcaatccaaagtcaggcctgatgctgagagcctgccatttattttccctaaggcaatgtcctgaagttttaaaggttgtgcatctttttttttttttttttttttttttttttttgagatagggtctcactctgttgcccaggctggagtgcagtggcacaatctcggctcactgcaacctctgcctcccaggttcaagagattctcctgcctcagcctcccaagtagctagggctacaggggcatgccaccatgcccagctaatttttttgtatttttagtagagatagggtttcaccatgttagccaggatggtctcggtctcctgacctcaggtgatccgccctcctgggcctcccaaagtgctgggattacaggcgtgagccaccacgccctgcctcatcttctttcaaagcagcagtgtcaagccagttggtaagatccacagctgctgttgagatccaagtgctgtctgtgggagctcattctgagctgtgcatgggcatgtgtggggtactattcaaggtggggttcccagggtgctaggagaatgtgttggctatttgggaagccctctgacaagtcattctgcagggtttatgggcaggcctcttggcggagttcaagagctggttatcccagtggaatatgtttgtaattgcagtggaatgtgtttgtaaaacatctttggttttcaaagttctgcagcatgagcatatgaggtacctgagcaggtatcatctccactctacaaaagaataaactgaggaccaaaggatttaagtgcagtgctgtacccaccacatcttgcagaggattctaagtggcaaggagcttctgacaatgatgctgcttctaagcgggggtgtgtctggggttagcagtggggccaccacgtgatcaatccgccgacagatcaagcacagcctcttcctcctgggtgcgccaggcccaaggacagaggatgatgcccacgcagccaggaaagagcggcatcattgtcagcccctaccccaccctcgtcttgggagcctgcaggctccgtggtgccacgggagccccaccgcacctcacgtatccgcgcgagtctctagcacagccccgctcttgggcgttagaaccccgcgaggggggatgaaggacgccaccgaggaagcagaccccaccgggctcccgaggctgccaggccccccgctcagggcgctgcctgcagaaccacgcccccctgtccctgtgctaagagggtgacgcgagtgcccgaagccctggcctggttaccattcgcgactccctcgtcctgggttctcccattgccaggaatgttttactagtaaccatggtatagttgagacgatccactcttgtcctacgcatttcggcacaatacaggcgtctaggaggcttacctggcattgcctgagagaatcttccatccatttaagtaagtaaacaccagcggggctgttggccttgtgagttgtggcaccgtgaaaaaccaaggcctgcagttctcagcatctgcccaatttgagctcctgtttgaaaccactgttgggtttcccttctcttcctaatggttcaggtggccataagatatcctcttaagcttgagtgtcagttattttataagatctctgtttatcaccttgagatgttctgcagggtccctgaagtgaatttcgtgtattcacatagcctagattttaagtcgttgcattccagacttaccattcaaatttggagtttcagcttgctctttaggacagtagtaataaaactacaatcatgactacatttattgcacaatgttacatactagacacttttctaaattatctattaatactaattttatgaatgccatgagctcctatactaagacctcaaatagcatgaaatgaaatccagtcagtttagctgtttgcaaactgcaggaacacatagaaacttcgttgtacttatacatttatttgacagtcactgagctccaaaaaaaaaaaaaaatgtaccatgcacagtgcttagaatctacagttacaaagatgaatatgacaaaaacatacaaaaaaatgacttattggtggaactgaaactgaccagaaatggctggagtatggtttgagaaattagcctggaaaggaagctggagggcacatcgtgaaagcctcttgtatgtttgcagactattctaaagtcagtagggagcctctaaaatggtatgatgatatatgaagaattgctgtggctgagatgtggggaataggctgaaggagcaatgaaatgaataatgaatattagaggacagatgaccgaataagaaatcttcataatagtccaagcaaaaaaatgagctccttgcgaactgagccagtgatctttgtctaccatttctatctctacacccacccctcaatatagtaacagatttggatttggagttttccatgttttaatgggttggttgatttggttcagctgggttggactggctttgggggaagactaaaggggaggaagttggaagggagcagtgaggtattcaagtttaacaatacttcagttggatttctgggcaccattttaattccactgaggaatagaagtttaaattaggaatgggacaaaagccaagtgcaggatatggaaagctcatggagaaggttagaggagagttccaatgcagtgagcatgtgggaacccaaaagactcattcctaagatataagacttatgtcagtgaaagtaatctaaaacgacatggttagaggtgacatcagtgaaaatggcacagtggggaacaccaagcaattaataagctggaaaaaactttcagaagcaacattctcacaactctgaaaattaacgaaaacttgcagcaaccaagggatgcttgatcaagaaaacacaaggaaatgttggaaacagatttttgtgacattttaatttatcctagtctcatttcccactccccagctcgtcagtgcccttgaataaaacagccttcattctctgtataggtacccagtaacagagggagcaaagcaaatcttatcctcaaagaactgcagctgcttgttagatctacctggtggttccatagagaaactgctcagagaacctgcctttacctcgcctaaaacagaactatcccggagctcaggtaagcagtggcatttgtcaaaaacatgtaaaggaaaaaacataatagtcattgatttctgaggcaaggaataatggttgggacaaataatagactaactgaaaagtttgggagaaaaggccagggaatgagatgctttgagtaacaaactcccacatatttctgataatctagaaggccacagacatgccctgggctagacacatgctcagaaaagacctgaaaacatcctaaggtctcaccttcggataatgttcagactctgcacaagtaggaagtaaaggataagcagagtggtctttaatgcattttgagttgatttttgtatatggtgtgagaaaagggtccaatttcattattctgcatgtggatacccagttgtctcaacaccatttattgaagaggctgtcctttctccattgtgtgcttttggcatctttgccaaaaatctgttgaccataaatgtgcaggtttatttgtgagttcttcagtctgttccattggtcactgagtctgttttcatggcaataccatgttgttttgattattatagctttgtaatatatttcaagattatatagtgtgatgacttcagctttgttcattttgctgaagattgctttggctagttggggtcttttgtgattccacacaaatttcagattttttctctatttctgtgagaaatagattgaattttgatagagattgcattgaatccatagactgatttgggtagtatggatatttcaacaatattaactcatccaatccatgaacatgaaatagcttttcatttatttgtgttttcttccattccttttatcaatggtttgtagttttcagtatataaatcatttaactccttggttaaatttgtttctacatattttttatactactgtaactgggtttgtttccttaatttattttttggatagttcattgttagtacaaagaaaaccttctgattcttgcatgttgattttttctttttctttttttctttctttttttttttttttttttttgagatggagtcttgttctgtcaccccaggctggaatgcagtggcatgatcttagctcactgcaacctccacctcccaggttcaagtgattcttatgcctcagcctcctgagtagctgtgattacagatgtgtgccaccatgcccagctaatttttgtatttttagtagagacaaggtttcaccatgttggccaggctggtctcgaactcctgacctcaagcgatccacctgccttggcctcccagagtgctgggattatagacatgagccaccacatccagccgcatgttggtttttaaccttgaaaccttactgaatttgcttattagttctaatagttttttggtggaatctatgggattttctatatataggatcatgtcatcatgtctatggggttttctatacataggattcatttcctatctggatgccaatgtgtccaggaagtggaacatggagtcaagcaagattattctgtagacttgagatttaacattctttacccagttgagtttttctttgttgctatttctcccttttagaatgaaaatatctatcctatgcctgtcacactattgtgttttggaagcacaaaacttattcgatttcacaggcccacagctggagggaaacttatctcaggatgaatcatgccttgaatctcatgcctatatctgatttagatgatactcttgactttggacttttgagctgttgctggaacaagttaagactttgggtctctagggatagaatgactgcattttgtatattaggacatatgttttgggggactatgggataaatgctatggtttgaaggtttgtcccctcccaaatcgtgttgaaatttagttgccgttttatcaatattaagaggcaagacctttaagagtgattcatccatgatgtctctgctctcatgaatggattaatgccttatcactggagtggctttgttattgagggaatcggttcattataaaaggaagagtttggtcctcttttgcctctctatctctcaccatctctttgcctttccaccatgggatgacacaacagtaagacccttgccagatgccaactcctcaatcttagacttcccagcttccaaaactttgagccaataaattacacagtctgtggtattctattacagcacaaaatggactaatacaacttgagaggagcctaatatatgatgtatcctggagaatgttccattagtacttgagaagaatgtgtattctgctactattagaagaaatgttctttatttgtatattaggtctattaggtctacagtgtagttcaagtccaggatttccttaatgattttctgtctggatgatctgtccattgctgaaagtgggatattgaagttgcctactattattgaattgcagtttattgctcccttcatatctattaatattatatatatgcacacatttatatggtgctccaatgtcgggtgcatatatatttacaattgttatgtccttttgatgaattgacccctttatcactatataattactttgtctctttttacgattttttacttaaagtctatcttgacacatataagatagctacccatgcactggtctccctttgtgtggaatatctttttccatcccttcacttttagtctaagagtgtctttaaaggtgaagtgagtctcttataggttccatagagttgggtcttatttgtttattcattcaaccactctgtcttttgattggagaatttaatctatttacatttaaggtaatgtttgacaagtgaagagttagtattgccattttggtatttgtttactgactgttttgtagttcctttgttcttccaatcttgctggtttcctttgtgatttgttgaatttttgtagtgatatgctttgattttttttttatctttttcacatctgctataggctttctttgttttgttttgggttttttttggtttttctaatactttaagttctagggtacatgtgcacaacgtgcaagtttgttacataggtacacatgtgccatgttggtttgctgcaccgatcaactcatcatttacattaggtatttctcctaatgctattcctcccccagccccctgacaggccctggtgtgtgatgttccccaccctgtgtccacgtgttctagttgttcaactctcacctatgagtgagaacatgaggtgtttagttttctgtccttgtgatagtttgctgagaatgatggtttccagcttcatccatgtcctggcaaaggacatgaacttatccttttttatggctgcatagtattccacggtgtatatgtgccacattttcttaatccagtctatcattgatggacatttgggttggttccaagtctctgccattgtgaatagtgccacaataaacatacgtgtgcatgtgtctttacagtagcatgatttataatcctttgggtgtataccagtagtgggattgctgggtcaaatggtatttctagttctagatccctgaggaatcgccacactgtcttccataatggttgaactagtttacagtcccaccaacagtgtaaaagtggtcctatttgtccacatcttctccagcacctgttcgtttcctgacttttttatgaacaccattctaactggtgtgagatggtacctcattgtggttttgattcgcatttctctgatgaacagtgatgatgagcattttttcatgtgtctgttggctgcataaatgtcttcttttgagaagtgtctgttcatatcctttgcccactttttgatggggttttttttttcttgtaaattggtttaagttctttgtagaatctggatattaagccctttgtcagatgggtagattgcaaagattttctcccattctgtaggttgctgctataggctttcttttgtatttaccatgaggcttaaataaaaaatcttgtagatatacctattttaagctgatgacaacccaacctcacttgcatacaaaacctctacacttttacaccccataccacattttacatttttctgttacagtttacttctctaggaaagacgaaaataatgggagtgggtcagctacatcaaaaggtatctactcagtctcattttaaggtcattacagaagaataaaatctaagaggtagcttttggcttttgccaggaagttattgctgtttagcagagaatagtgtcagtgggttgatgcaaaaagctttttgcaaggaattgctaagcagtggaaaatcagaggcttccatttcaagtgccttatctcaaaataatcattagtattacttgttctctatatttctctatagcaaaggagtccattcatcctctataactgctatacaatatctctgttaaaatgctgagaagatttatcctaaaagaaggcaccaaagcaatgggggtaaggactaagtgctacttgggttaataaatgactagtgttgcttcttcctaatagaaaaaggaaaagacattgaccacatcttccccaaaggaaggagaattgacaaaagtgtcctaaggtgatgataactagcctaaagctaattggactcaaatgtgacggacccaaaaaaacattccggaatagttcaacgttaccacaatccacccagggttctaacaaatacattctgtgtttgctgatatatgagaggtccattttctgcctgtgtctgtaaacagtttgaatcaaagctcatcaatcataaagtggtcaggtaatgggcttaaaaccagaaaaggctgtagaccctggggcactgtactgtcaacatgtgccccttacattcagctcaggtgggtcacattctgcttcaatgatctcccgctcagctctcctcaatcttagaatactatacccttttgtattatccaatatttgtgggaccttgaatcacatttgcatttaagtcagcaacattaaaccttgcactaggaaaattctcaacgtatcaaatatattattatctccagctggttgagacctacccagtacactatcagaatgcagggcatacctacatgcctctgagtcaacaggcaaaaatgagagttaacgatgttagctagggtgatcaatccaggatgccaaggggaaattggaccactacttcacaatgaatagaggcaaaaatgaatatgtctggaatacaggagatcctttaagatgtctcttagtactgtcatgccccatgattaaggtcaatgggaaattacaacaacccaatccaggcaagcctatgaatggcccagactcttcaggattaaaggtttgggttatcctgtcaggtaaagaaacatgaccagccaaggttgcataatacccaggcacaaccccaaagtagacagctgtagcactgtagcccctttctgaggcattcctgaagaaaataatgaagaaaaatcttcccagtggacagaacttcaagcagtacacgaggttgtatattttgcttggaaggagaaatagccgggtgtgtgactatatactaattcatgggctgtggccaatggtgtggctggaatgtcagggacttgaaacgaatatgattagaaaagtggtgacataggagtctagagaacaggtttgtggatagacttctgaataggcaaaacacataaagatatttgtgtcccatgttaatgtccaccaaagagcatgattctcctgcctcagcctcccaagtagctgggattacaggtgcacaccactatgcccagctaatttttgtatttttagtagagatggggtttcaccatgttggccaggctagtcttgaactcctgacttcaggaaatccacccgcctcggcctcccaaagtgctgggattacaggcatgagccaccatgcccagccagcagaggaagatcttaataatcaagtagataggatggcccattctgtggataccactcagcctctttcctcagccaccccatcattgtccaatgggcccattaacaaagtggccatggtggcagtggcagggatggaggttatgcatgagctcagccacatgggcttccactcaccaaggctgacttggctacagtcactgataggtgcccaaaatgccagcagcagagatgaacattaggttcctgatatggtactattccctggggtgattagcctggtggcagaatggctacattggaccatttctgtcatggagagggcagtgttttcttcttactggaatagatacttattctagatatggttttaccttccctgcattcaatgcctctgcaaaaactaccatccatggacttacagaatgccatatctattgccatggtaatgccacacagcattgtttttgatcagcgaactcacttcagagcaaatgaagtgcaacaataagctcaagctcatgtaatttgctggtcttactatgttccccaccattatgaagcagctggtttgacaggatgatggaatgaacttttgaagacaattacagcaccagctagctggcaatatcctgcataactgggggaaggttcactagcagagtgtttctcccacagctaggattcacaggtccagaaatcagggagtgaaaatgggagtgacaccactcactattacccatagttacctactagcaaaaatttgcttcctgtcctgaaacattatactgtgcttgtcagatgtctttattccaatggaagaaatgcttctaccaggagacataataatgatttcattgaactggaagttaggactcccaactagccattttggactttttatctctgaatcagttggcaaagaagggagttattgtgctggaaggggttatcgatactgactaccataaggaaatttggcctattacttcacagttaaggaagtgtatattagtaatacaggaagccccctagggtatcctcagtattaccatgtcctgtgattaaggtcaatggaaaactacaacaacccaattagaacaggactactgatggcccagactcttcaggagtgatggtttgggtcaacccaccaagtcaataatcacagcctgctgaggtgcttgctgaaagcaaaggaaatatggaatgggtagtgggagaaaataatcataaataccagctataaccatgtggccagttacagaaataaggactgtaattgtcatgagtatttttccttattttgttatgaacatgtttgtgtgtttgtgtgtattacatacctttgttttcttccctctcttatccccttattatgtaacataagatgtgttgactttatgttatggcttttaagttgtggtatttcaacagaagagtaaacgtcactcaagaattttgcatcctcttctggaaaagtgttagtgcattttttgttgtatgcatgacagctgttaggcaaaagtacatctttctttggagattaagtatggtttcacgagatgtgtaagtggactgctaagtggactgctaagtggacatgaagttgacttgtgatgggtaattttatgtgtcaacttatctctgtcaaaatatgcctagatagttgttcaaacattattctggctgttcctgtgagggtgtttgtggatgacattaacatttaagtcgctggtctttgagtaaagcagattgcccttcataatgtgggtagattttattcaatcagttgaaggtctgagtgaaacaaaaggctgaccttcccccctccatttccctcatccctcccctcatggagcaagaggaattttccagaagactgccttcaagcttcatctgcaccatcagctcttccgtatctccagcctgctggcccacactataaattttggacttgccagccaaaatttacagagtacatgtacagatacagagtaaatcaaaacgactgaggcaagtctaaatcattttaagatgtttgtttgccaaggttaaggacatgcctgagaaagaacccagaaccacagggaaaattgtgacccatactttttctgaagagggtctggagacctcagtattcaaaggcaaaagcgcaggtatgaggaaagaggaagaaattttttaaagggtgtgactagataagaggcaagcagttgcatcctcttgagtgtttcatcagccattccctgaatacacaatgtacgcatgacaggggggtacaggaatagttacttatacatttgtctagtccaataaatctgccttttcacataagataaaataaacatagggcagaggaagcaatcagatatgcatttgtctcaggtgagcagagagatgactgagttctgtccttcgtcccacacctgtgaagataaggtcctaagatttattttccttttactaacatatatattatacacacatatatgtatatataaaatatatagggtctgtttctctggagaactctgaataatatacttttacataatctcaataccagaacagaaacccatatattccctatgaacatgaattttaaggtaatctgattgaagtagctttaattcacttaaaactacctaaatagatcagaaagaaagaatgggcaccaggggataaagtagttgcagggcagatgatgttgggttttaatctccaatacggccccttcggtggttgcacacatcctagtcactggtgtgcgcaggtggctctactccggctggaaaataaagcccagctccaagcaggccccagagaaccacttcacataagagctatagaaaaccaggagtcactagagggcctgcttgcctgcttttttgaacaaggtctagagctgtgatccagattggttacaaaggtcagcactggttgcaggagcaggcagagcagagagaaactgaggtccaagtcacaaacaagagaggatgagggaagtaaggcaagatcaaaagttcctatttgggattcacagtggagaacaagagctgagtctacaggctggagctggcctcagagaaccaaccatgggacggagacaaatatcaaggagaaccttaaggatcctcagagccaacagctctccttttgttgtgtgtcctgggccaaacaaataggcctctgctttttacttaactagaaccaactagaaaaataaatattagttgtctctaaaggttgctatgaaacaaaagcaaatactccctgtttaaatacatgaggagaccgcaccacctaactgtggctgccatttctctattcagcctgctttctctctgacacacaattctttcactactgcttcagaagtaccagggtaaagcaaacattctcctaacctctcagtcacccagactgtaatcatctgtggtagatttgacttgagtaataatgttggctctctcttctcacaggctgtgcaaataatgattggcctgattcacagtgcactgggaactctctgaattcattggattttgctaagagaggattcaagtggttctggtcctatccctataattgctgtagtaatttactcatttttgtcattattttttgtgagtaaaccatggtattattgctttcaattcatttatttttttctattgaattcaggtgtctagaaatgggctaaagacccaatctctaacttaaaggagcccatttttgtgtgaatacagacttagaaatgccttatgtttgttgtatattttaataattttcttgagaggttgaggtgcctatatggaaaatatattaaaggaggatgcttgaagaataataaagagagtggctatttgggtaactacaaggcttatcttttgcagaatgaaaaatccaaaggccttagcttaatgtctggggctacagaggcaatttttagagagcatgtatacagaaaaaaaaaaaaaaggagacctagaggcacaggaggaatttggggaaattaaacagagatttctaaagtagatgttctgaataagggtattataataattccatggtagcagttgccaaaactcccaccaagggcatgcccaattacagaagcagaaagtttacccaaggttaaatttctccatagaagagagttttattacctccttacccacaactttgtacttttcaaccaaaaacagggcttcaagggagagaagatttagtataacacattcccttttgctttgtgaaaaggcctctgagacatccctgtacagtcatttcacccagagaagggcctggtgatctctgctctggataaaagacattattttctctaaggctttcttatagtgggagtcctcaagtggaagacatttacaaacaccgagaactttctggaaagagtgtatgtaataaagacaaatcatttaaactgaaataatacaattaatcacttattgcaaatcatctagaaagaatcctcagcccaagatatgaaagaggagcatatgacagatatttagccatagataataattactcaattttatacctattatgtatcaggcatctccaaaaggcactccaagttcattttaccttaattgccacgacaaccccatgagatagctatcattcatctccatttgacaaacagggaaactgaggcttggagaacttaagtgactctcacagagtgacacagcaatgaagtgtcagaggtaaaaacaaacaaacacaagctaagatgattctgccttcatgacaggatttcattttcctgggctgaaggatccccagtccccttcttagtatgtttgaatcatcttttgttattgccgcaggcagattgaagacaggtatatgatttactggaaaaaaattaattcttggtattccagaaacaacaatcctttcaattagtgccagaaggtgatgatagcacttagggtatgatatttgtggaaggcaacctataaatcttcagatgtaatgttttctgaaactattcccactgatgaaattttttttataacattatgggagaaacgtagttcttgcaagtgagagccaccacactagccactaggaaatattttctaataattcatttcaagggatcaataaatgacaattaaaacaagtgaagtgcctacaacttgtcctcataaaatcattgtgagctccctaagtcccatcacctatgcaaaggtctcattaatgaccggagactttaaaacatttttcatccctataacagagaaatagtgaatccatgctttagaaattgtactagcggtcactacagacttcgaatggggtttttcatgttaaaatcactttcttcagaaatgcattcagtgccactttggatattaggaatgccactggctctagggaaagaagctattgaggggattatcataaggcattgtgtgtttataaatgcttatttctatccccagttcatcaactcaggatccagtagtgtaatacagaagcctgttacgagatataaggtatgtcagaatattcggagcaactctaaagattaaaatgttacttggtgcaaacaaacaaaaaaagaaattattgctgggccaacatttttggggaaaaaaaacttttccaaatgtttaaatgaaaaaaaattatttaatttttgtaaagatatcctccagtgcatcctctgtgcatgaatgttggaggaggatacagtgtgagcaataatattgtatacagagacagacgtgagagtttccatgaaataaatcatttcaagctatctcaacgagcatatataaccaaataaaacttaagacaaggccttactctgtcacccaggctggtgtgcagtgggtgatcacagctcaatgcaacctggagctcctgggctcaagtgatcctccagcctctgcctcccaaatagctgggactgcaggtgtgtgccaccacacctggttttttcattttttgcagagataagggtcttgctatgtttcccaggctggttttggactcctggcctcaaggcatactcctgccttggtctccgaaagtgcagggattatagacatgagccactaaacctagccaccaaacaaaacttcgaccctgagaatcaaagcattgggaagcgaagaaatgtaattaggataagattagaaaattagtgtctagttaaggagaatggataagacaaaataatgtgtgaaaagagaattgccttcagcaaaaccaggtcaggaaatatcaattagaacacaaaccagatatcatgacaacacatctaacgaaggatggtcctttttcttttagaacttccctcctgtctctcacagccccccttgtgattaggatcacagctctggaggcagatagcctgaattttccaattctgactgccttactagtgcctgtgtaaccctgagcaaattactttactctgtgcctcactctcctcatttaaaaaataaaatgtggttaataatagtaactgcctcaaagggttgctgtgaggattaaattagtatgtaagcataaagaacagtacctggggccacacagggtggctcatgcctataatctcagccctttgggaagccaaaggcaggtggatcagctgaagtcgcgtgttcgagaccagcctggtcaacatggcaaagccccgtctctactaaaaatacaaaaattagctgggtgtgatggcgcacgtctgtaatcccagctactcaggaggctgaggcacgagaatcgcttgaacctgggaggcaaaggttgccgtgagctgagatcctgccactgctctccagcctgagtgacagagcaagtctccatctcaagaaaaaagaacagtaactggcacaaagataccactctgcttatcaaaacccgctgagaaaaaacaggtggattctcctctttccccaggggaaaatctgctttcagggactggtaagagaagaaattgaaattgtatttcatatttcagataaaggggtcctcctattttttctttcagtagaatagggtcagagtggtatgagaggccatttttctcagccccagattggaagctataattatgggcattaagctattacactttttttaacttctattcccaaggtagccactgttaatatcatttttcattctaggcctttttctaagctttttttttttttttttttttgtaatttgtttgcaagcagagtgaacatgtgacttagaagtcacctggtgttgcttttccacggaaaaccttacatccacagagatataagtacagatgacatgaaagcccataaagcccccatgtgatttggtaaactcccagaactagcattctcatagtttagtttctgtattggtgcatactgtcccaaattttctccacaacacccaaagaaacagttgtgaataaactcagccccttgactgattttcacaaaaactcacaaaaagttttgggtttttttactcgaggattggtgggggaagattatgattgtaatttccaagttccagtcacaacctagatccctttgtaactctctccctaatccccatcactccgtcttctgcccttctttttccatctccccactccacctcaatcaatcaatctatacatatacatatatgtgtgtgtgtgtgtgtgtgtgtgtgtgtagatatatatatatataatttgctgcatgtcaggcatgttctatgtatgtaggatgcatcagtgaacaaacagatgaaaatttattacccttagggagcttacattctaatagcaggataaaagcaataacaataaacaggacaaacagggaaataatataatatgttagaaggtgataggtgtgatgaaaaaaagaaaacgtaataagggctgccatagtttcgtcttgaacatttggacggattcagttgagaatcttagacatgaagatatttaaagccaggagacttgttgagatctccagtggaaagaacacaacaaagacgaaaagagaaacaagaactgagccctagggcactccaacatgaaaaatagaaaaaaggggagaaaataataatttttttacttgaaaagtttcttggtttaatcatgttctaaagagtaaaatattatatcttattcgtgtgcatgttttcaagttaaagcagaaaataaatgtagaatatatgtttttgtttgaatttttttttttgttttttgcttgtttgtttgttttttgagacagaatcttgctctgttacccaggctggagtgcagtggtgcagtctcagctcactgcaacctctgcctcccaggtacaagcaatcctcccaactcagcctcccaagtagctgggactacaggctcccaccaccacgccctgctaatttttgtatttttagtggagacggtgtttcatcatattggccaggctggtctcaaactcctgacctcaagtgatctacccacttcagcctcccaaaatgctggaattacagtcattagccaccgtgccccaccagaatatatgtcttttgtaccataatttttaaattgttttttcaaacaatatacattaagtgacttccttttggggtgcagatatttgagttcaggaacttttttctgaaaacatatatatttattttcatgtaaacctgggaaaatctttagctgtctatgtaagtattatcttaattgattcttttcttaagcatacaactcaatagtttttagtatattcactgatatgtgcaattattaacacagtccattcaaaaacattttcatcacctcaaaaagcaactctgtaccccttggctatcactcccatccccaacttcccattctccccaaccttaggcagccactaatctacatagggtctccatatattttcctactccagacatttcattaaaaatgaatcacatcatatgtaatttcttgttaactggcttatttcactcaatatattgtggtaaaagttcactcatgttgtagcatatatcagtactttattctttttatgactaaacatttctatacaccataacattcaagctgagagtcaaatcaagaatgcaattgcatttacaatagccacaaaagtaataaaatacctagaaatacatctaaccaaggaggtgaaagatctctacaaggaaaactagttaatacaaaatattgcttaaagaaatcatatatgacacaaacaaatggaaaaacattttatactcatggattagaagaatcaaaatcattaaaatggccatactgcgcaaagcaagctacagattcaatgctatttctatcaaaccaccaattatcatttttagcacaattagaaaaagtatttctaaaattcatatggaatcaaaaaagaacccaaatagcaaaagcaatcttaatcaaaaggaataaagccagaagcatccacattacctgacttcaaagtatactacaagggtatagtaactaaccagtaccatgctggtactggtgcaaaaacaggcacatagatcagtggaaccaaatagagaatttggaaatacatctgcacacccaaaaccaacttatattcaacaaagtcaacaaaaataagcaattgggtaaggattccccattcagtaatggtgctgggataagtggccatccatatacagaataataaaaccgaaccctcaaaagcaattgcaacaaaaacaaaaattgacaaatgggacctaattaaactaaagactttctgcacagcaaaaaaaagaaactattaaactaaacagacaacctgcagaatgggagaaaatatttgcaaactatacgtcctacaaaggacaaatactcagaatctataagtaacttaaacaattcaacaagcaaaaaacaaataaccaaattaaaaagtgggcaaatgacatgaacagtcacttcttaaaaagaagacatacaagcagccaacaaacatgaaaaatgcttaatatcactaattgtcaggaaaatgtaaaccaaaaccaaatgagataacatctcataccagtcagaatggctattactaaaaagtcaaaaaatagatattggtgagaatgcggacaaaaggaacacttatacactgctggtggaaaagtaaattagctcagtccctatggaaagcatctggaaatttctaaagaactaaaaataaaactaccacttgacccagcaatcccagtgcgcgtgtgcgccccngggacacngngncncncncncncncncncncngngngngngggtgcgtcgtcccactctntnncaaagacacgcgctcactcccggtgcccctctctggcgatatgggtatagaaaaagagatatatctctatatatacatatatatatatatatatatatatatatatatatatatatatatatatgcataccatggaatactacacagccataaaaaagagtgaaatcatgtcctttgcagcaatatggatgcagctggaggccattgtcctaggtgaattaatgcagaaacagaaaaccaaatgccagtggggttataataagtgggagcaaaacgttgggtacatatgcacataaagataagaaaatagacattgatgaatgctactgggggaaggcaggagggaagaaagttttaaaaactacctcttgggtactaactgggtgatgggatcaatcataccccaaacctcagcattataaaatacacccaaataacaaaactgtacatatgccccctgaatctaaaatgaaagttgaattttttttaaagaacgtgaatagatattgttttatttctatagtttattcagaaataaatctgcacacccacaaccaactggtattcaacaaagtcaacaaaaataagcaatggggtaaggagtccctattcaataatggtgctgggatcattggccatccatacacagaataataaaactggaccctctgaatgccttttgggttttctttactgccgaactgccctggttagaatttctaatacaaggttgaatagatataatgagagtatatctcaccgtcttattcctcatgaaagcattgagtctttcaccaataggtgtgttaggtgtggatttttattagatgctccttatcaggttgagaaagatcccatctattttgagtattttgagtgtttttatcataaaacagtgaagaattttcaccaaatgctttgtctacatcaattgagatgatcatatgtgtgtttttctattttactgatatggcatatgacattaattgtataagataaaaccagccttgcatttgtggaataaatcacacttgcttacagtgtacaagcatacctcgttttattgtgctttgctatattgcacctcacagataatgaggttttttacaaagtgaaggtttataataacactgcatcaagcaaagctgtttcttcaacatcacgtgctcacttcatgtctccgtgtcaccttttagtaattctcacaatatttcaaacttttttatgattattatatttgtcatagtgatctgtgatcagtgacctttatgattattatatttgtcatagtgatctgtgattggtgaccttcgatattaacattgttattgttttggcataccataaactgtgtctatataagacaacaaatttaattgataaatatgtgcgttctgactgctctaccaaccacacttacccttgtctctctccatctccttgggcttctctattttctaatatacaacaacattgaaattaggccaattaattatatttgtcatagtgatctgtgatcagtgacctttatgattattatatttgtcatagtgatctgtgatcggtgacctttgatattaacattgttattgttttggcataccataaactgtgtctatataagataacaaatttaattgataaatatgtgtgttctgactgctctaccaaccatccttacccctgtctctctccatctccttgggcttctctattttctgagatacaacaacattgaaattaggccaattaataaccatacaatggcctctaaattttaagtgaaaagaagagccacacatctctctcttaagtcaaaagttataaatgattaagcttatgaggaaggcatatagaaaggtgagataggccaaagttaatcctcttgcacccaaccattaacataggtgtgaatgtaaaggaaaaattcttgaaggaaattaaaagtgctgcttgagttaacacacaagtgataagaaaacaaaacaagcttgttgctgatgtggagaaagttttagttgtctggacagatcaaaccaactacagcatttccttaagccaaagcctaatccctagcaaggccctaattggctcttttcaattctgtgaagaccgagagagatgaagaagcttcagaagaagagtttgaagctagcaaggttgattcatgaggtttaaggaaagaagttgtctccataacataaaaatacaaggtgaaacagcaagtgataatgtaggagctgcagcaagttatccagaagatctagctaaaataattgatgaaggtggctgtattaaacaacagattttcaatgtagataaaacagccttatattggaagaagacgtcttataggactttcccagctagagacaatgcttgggctcagagcttcaaaggacaggctgactctcttgttagaggctaatgcagctgatgactgtaagttgaagctaatgctcatttactatactgaaaattctagggcccttaagaattaatctactctgcttatggtctgtaaatggcataagaaagcatggataacagcacatctgtttacagcatgatttacagaatattttaaattcaatattaagaactactactcaggaaaaaaagcttccttttaaaatattactgctcattgacagtgcacctggtcacatgtgttttcatgtctgttaacataacatccaatttgcagtgatgaatcaaggagtaatttgtactttcaagtcttgttatttaagaaatacattttgtaagactacagctgtcatagctagtgattcctctgatagatctcggcaaagtaaattgaagagcttctggaagattcaccattctagatgacattaagagcattaatgacatacaggaggaggtcaagatagcaacattagcaggactttggaaaaagttgatactacctctcatgaataactttgaggggttcaagacctcggcggaggaaatcactgcagatgggatggaaatagcaagaagggaagcctgaagatgtgactgaattgctgtaatctcctgataaaactttaatggataaggagttgcttcttatggatgagtaaagaaagtgctttcttcaggtggattctactccagtgaagatgctatgaacattgctgaaatgacaatgaagaattcagaatattacataagcttagttgataaagcactgtcaaggttggagaggattgactccaattttggaagaagttgtatggtggataaaatgctatcaaaaaacattgcatacaacagaggaaacttttgggaaaagaagagttgatgggtgcagcaaacttcatgttatctaatcttaagaaattgccacagggaccccaaccttcagtaaacaccaccctaatcagtcagcagccaacaacatcaaggcaagaccctccaccagcaaaaacattacagctcactgaggcttaggtgatcattagctttttttagcaataaaatattcttaaattaagtacatttttagacataaagctattgcacacttgcacacttaatagacgacaataaactgtaaacagtagcataacttttttttttttaaggcggagtctctctctgtcccccaggctggagtgcagtggcacaatctcggctcactgcaagctccgcctcctgggttcatgccattctcctgcctcagcctcccaagtagctgggattacaggcacctgccaccacgcccggctaatttttttgtatttttagtagagatggggtttcgccatgttagccaggatggtcttgatctcctgaccttgtgatccacctgcctcggcctcccaaagtgctgggattacaggtgtgagccactgcgcccagccagcataacttttatatgcattgggaaactaaaaaattcatctgttacgttattaaagtattcattttattgcagtggcctgaatctgaacctgcaatatctccaaagtatgcctgcatatttctttttctgtgttgctgtattgagtttgctaacattttgttgaagatttttgtgtccatgttcataagagatcatggtttttagttttcttttgttgtgatgcattagtctgattttgatctcagggtaatagtggcctcacagaacgagttaggaagtgttccctcctcttctattcttagaagagtttgtgaagaaggtaattctttaaatatttggtagaagtcaccactgaagtaatctgggtctgcacttttcttcatagaagatctgattataaatttaaataccttaattctttatagtctattcagattttctatttcttccttagttttagtagtttgcatgtttctaggaacttgtccatttcagcaggttatctaatttgttggcatataattgttcatagtattctttcataatcacatttatttctataaggtttgtagtaatgtttccacattcatttctgattgtactaatttgagacttctctatttttctttagtctcattaaaggcttttccattttgttcatctttcaaagaatcaacttttgtgttcattgattttatctactgtttttctattttgcttctaaataattttcactttaatctttactactttatttccttctgctttcttcaggtttgatatgggttttttttattttcattatcttaagatggaaagttaggttattgatttggggtctttcttctttgttagtataggcatttacagctataaatttctatctaagcactaatttagctgcatcctataagcattgatatgctgtatcttcattttcattcatcgcaaagtattttctaattttctttttatttcttctttaatcccttggttatttaggagtatgttgttaatttccacatatttggggtttcccaaatttgtgttattaattttaattttgttccattgtacttagagaaaatactttactatttctagccttttaaatttattaaaatgtgttatgccctaaactctggtctattccaaagaatgtcccatgtgcagttcagaaaaccgtgtattcttctgttgttgggtgaaatgttctatagatgtctgttaggtttagttggtttataatgttgttcaaatcttctatttccttgtttatcttctgccttgttgctctactcatcattaaaagtgggtcattgaagtccctaactattattgttaaattgtctgtttctttctttgtttctgtctggttctgctttgcgtgtttcaagcctctgttcttagaaaatatatgtttataaccattataaaatgttcctctctatctctagtagcatttttttttttttgagacggagtctcactctgttgcccaggttggagtgcagtggccccatctctgctcactgccagttccgcctcctgggttcacaccattctcctgccacagcctcccgagtagctgggaccacaggcgcccaccaccacgcccagctaattttttgtatttttagtagagatggggtttcaccatgttagccaggatggtctccatctcctgacctcgtgatctgcccgcctcggcctcccaaagtgctgggattacaggcatgagccaccatgcccggccaacatttttaaaatatattttgtctggtattagtatagccattctagctttcttgtgtttgttctttggattacaaatatttttctatttttttgttttcattctttttgtgtctttgaatctaaagtgtgtctcccatagacagcacatagttggatctggtttttgtatccaatctgacaatctctgcctttaattgaattgttttattaattcacatttaatcttatattgaaatagttaggcttgcatttgacattttactttttctccatgttttatgttttttgtttctctattctgccttgactgctttattttttggctaagtggatattttctaatgtagtattttaatttttaataattttttactgtatatttcagttatttcattaattgtcgctctaaggctcatcatattttaacttatcaaaatctgcttcacatttatactaatttaattccagtgaaatatagaaacattatccctgtatagctctatttcaatacctctttatgtgatattattgatgtattacatctatgaatgttacaaacataagataacattatgattattactttatataattctatctcttttaaagaagcaaagagaagaaaaggaacaagtatacatttacagtttttgttatttaccatttatctatttaccattacaatttattatttaccagaaattttttatttataatttcttgttctcctcatttgttcctgtgggttcaaatttaacatctagagttaaactcctagatgttgattccttagcttaaaatacatttgctcctctccccccacttttgctgttattggcaaatatattgcatttccctatgttatagacccaacaatacgttacatacatattgtttcatatgattgctttttaaataagttagtagaagaaagaggataaatttgcatttacactttcttttatatttgtataattttcttttgtcagtgatctttatattttcatgagattcaaattactgtctgtagtcacttgcttttggtctgaagaattttctttagtattttttgtaaggcatgctagcaacaaattctttcagattttgttcatctgcaaatgtctttattttgttttcatttttgaaagacagctttgctagaagtaggattcttggttgataggtcttttttttctttgaaccctttgaatttgttatcccactaccttctgggtttcaatgtttctgattagaagtcagctgttaatcttattggagttcccttgtatgtctcaagtcatttttctcttgctgctttcgagattttctctttgttggctttcagcgtttttactgtgatatgtctacttgtggatttctttgtgagtttcttccttgggatttgttgagattcctaggcggtatagattaatggctttgaataaatatggaaaattttcaggcattatttctttgaatatattttctgcttctttctctttctccccctttctggtactttcattatgtatatgttgtttccttaatggtatttcacatttctctaagtctctattcatatttcttcattcacttttctctctgtctttcagattgcataatctctatcaatctatcttgaaattcactaattctttcttctgccacttcaaatctactgttgtgccactctaacgaattttttattttagctgttataattttcaactccagaatttccatttggtgttttaaaaatgatttatatatctttactgatattctctatttgatgcaatattgttatcacaccttcctttacttccttaatcgtggcttacttaagtgctcaaacatctttataatgactattttgaaacatttgtttattaaatattatatctggtctctcacagtttttgttgcctacagtttatatcatctatgggtcaaacttgcctgtttcattgtctgttttatattgttgcctattatataattgttttgctggaaactgggcattttcgataatatattatagcaactctgggtactcatcccccacaccaggacttattgttatttacttgattagaaaaaaactgtctaggttgtttcagtgaagtctatttctccgtcctcactgttaagctttgatgttgccccttatagggtacaggcttgtgatgcccacagtcaccctgggatgacatttatcttggaaaggctctttgtctctttccctaaccatacccagctgttaagctctgctagtgcttgctggttgttctgaggcaaaaactgcttcacagactaacccaaacaaatttgagctcctttgaggggatagctcccaaaatcagtgtttgagatttgttctgactccaaaagggctcttcctagcttccccttttcccatttctctctgggaaactcgtgggcctacagtttagcctgtatctaaaatgtatctgtgaacacctaccaagtgccttttaccacaacttccactgtttttgagagtacttgtaagcctaaacttctccacatgctacaaatgaagtcacctcctttgggaacagagtggagatttctattccatagcctatttctctcccaacatctctgagctaaggatctggtgcaggggtgaggaagtgggtagggacaacggagtctttctctttaagagttgagggtttggtgaatgggggaggggacagaagccccagttcctctcaacttgcctctcatgatgtgaaacccttaccccaaagccagaaaaaggtcaattagagcccagtattatagagtcttcatcccatgagtaaaagctgggtagaagagatcacccatctcttggctgccttcacttggtacttaccctcagtgttagtatttgggcaggaccagaaaggctaattagatggcctacccttcctgagaagatagtatagcactctgactgggatctttgagaaaagggagccctgtgtttttggctattccaatctagagtggtcttgctgatctgagaggagggagggagggtgcagatcttggttcagataccataccagaaactcttacagcatttactgagtagattttcttgaataaatgttcctttatttgctatattccattaaaaaggtttacagagtacagaggttttaaaggattaagatttttgaaataatttttacaaatttggctggggagctggttgagttcctcccattcttatgctggaagtgggactctccaaaaataataatgctgtacacttaattctataaataatttattagaatttttaggaacatagataccttcttaagtgatcctggttcataagcctctctatcctcattaatggacataggataagtgtgcagaggcattctaagcataccacaatctgactttgtactaaggatgaatctttttagttgacaactccagcagcatagttctacatattcacaaagctaaaattgaaaatcctaatcacaatatactagattattcctcctttagtatgccatgtattaaatgtattatttatacatgactaatacatatatgtattaatacatgacatgtattaaatgtattaaatgtattaaattttattaaatgaaattgtgcttgtaattatatctcccccattagattaaaagctccttgagtagaaacctgaggtttagtacattgtaggcattgtataattaatgaataaataaatattccctctgaaaaaaaaattatcctactagcttctagacaaatttgaggtggactcctgatatcaacctctgtgacaatcaaagaaagtcagatttttaaaactttaacttgaatgttctagccagtaggacagactgattgcttcagcaacatctgtttatgctgtccataaccaatttttctttgtatgtctattacaccttactttagcaattgtaatgaacagcataactatttgtgtgactacacttggtataattctattaagcatggagattgcaacttttgcattaaatgcaaccacatacaattggtcaaacgtaagtaccaattttaataataattagatcaaaattttaatataaatgaaaaattatggtgaatgatgtatgttgaagtgagtaaggcatagaaaaggccaccaaatgtgtcaattatctttggcatagaaatgtaaagataaactgtattttctctatattcttgctataagcacattgaaaaataagtttttctcaaaaatcgtgatgcactataaacctcaaagagagattaaaattatcgttaagataaaatgatagaatacttagaaaccccaaagacctacctgaaaaacaactgcagaagtcaaacagtttagagaggtggctggacaaaagaaaaacctgcaaaaattaatagattgtctttacactagaaataaccacttaaatattgaaatttttaaaaaaatcaaaataacagcaaaactataaatgtttaataagaagcattttaaaaggactgaatactttgaaaaattatgttcttgaatgcgaatttacaaaatcataaaattgcaagtttctgcaaattaacacataattgtgatgcaattccatttagaatctcaacagcatttcggaagtcatgcaataaaattactctaaaatgcatatagatagatgaataattgcataaaaatgccaagaaagtctagaagttacatagtgattgaggaggatcagataatttgctgcactagatattaaaacttgttattaggctattataataaaaatagtacagtatttacacactaaaaggaaaatttaactaagcacagaatagagagttgaaaaataaatctaagtataagtgaacacatattattttgtaggtgataacatgaccagtcaatagagaaaagatgaaattggaaaaaaacagtattaaatcaataagctattgatttccaagaaaataataatggacacctactttgtaccacaaataaaaataaatcacagatgaagtatgtgtacataaaaaccattaaaattagcataaaatatagaactaatatattatttacataagcaacagagaaaaccaagaaggaggaaagatagaaagacattttatgtcacaaatatttgcactttttatacaatacaggctgagacaacaatagcctaaagagttaaaatactgccccagtgggctgagggagtggggtccccaccccagggtgacaaagaatagggctgtcccctagctgactcagaagacagaaccacagaggattatcctcaggcctcaaaaatctaacaaaattttctctattgggttttggacttgcttaggtctgctgcccacttctttctttcttattttctctattggaaatcgaaatgactatcctctgccagtcccaccattgtattttagaagtagattactagttttctggcttcacaagtccacagatagtgaggaatttttgccccaagatgaatcatgctataagtgatgatttctagcatgaatctagatgctataactgatttagatgatgagatttgaggatttttgattttataatatttaggaaaagtttggacatagagttgattctagagtgggttacaactttcggagatgttgaaattagctgaatatattttgcacatgggaaggacatgaattgaggggaactagaggcagactgttatgggttgaattgtgataccgaaacatatatgttgcagtcctaacccatggcacctcagaatgtgacattttgggggaatgggattattccaggtataataagctaaattaagatgaggtcatacaggggtaggtaggtcattaatccagtatgattggtattcttataagagagaaatttggacataggtacataaggaagatggcactgtgtattagttcatttttacactgctataaagaactgactgagacagagtaatttataaaggaaagaggtttaattgactcacagttttgcatggctcgggaggtctcacaaaacttatagtcatgacagaaggcaaaggagaagcaagtaccttcttcacaaggaggcaggagagagagcaaaaggggaacagctacagacttttaaaccaccatatctcatgagaactcactcactaccatgaaacagcatgggggagccactcccatgatccaattacctcccaccaggtccctccctcaacacgtggggattacaattcgagatgagatttgggtggggacacagagccaaaccatattattccatccctggcccctcccaaacttcatctcctgctcacatttcaaaacacaatcatgccctcccagcagtcctccaaagtcttaactcattccagcattaattcaaaagtctaagttcaaagtctcacctgagacaaggaaatttccttccactgagcctgtaaaatcaaaaacaagttagttacttccaaggtacaatgggggtacaagcattaggtaaatgttcccattccaaatgggacaaattggccaaaacaaaggggccacaggtcccatgcaagtctgaaacccagtagggctgttattaaattctaaagcttcaaaatgatctcctttggctccatgtctcacatctggggtacacagatgcaagaggtgggctcccaaggccttgggcagctccacccctgtggctctgcagggtaaagcctctgcagctgttttcataggctgatgctgagtgcctgcagcttttccaggtgcgttgtagaggctgtcagtggatttaccattcttgggtctggagaatggtggccctcttctcacgggtctagtgggcagtgccccagtggggactctgtgggggcctcaaccccacatttcccctctgcagtgccctagtagaagttctccatgagggctccaaccctgtcacagccttcttcctggacatccaggcattttcatacatcctctgaaatctaggtggagcccaccaagcctcaactcctgacctcggtgcacccacaggcccaacaccatgtgaaagccaccaaggcttggggcttgctccctctgaagcaacagcccaagctgtaccttggccccttttagccacagctggagctggtgtggctgggaagcagggccccaagtcccgagactgcacagagcagcagcaggggccctggacctgggccacaaaaccattttttcctcctaggcctccaggcctgtgatgggaggggctacagtgaagatgtttgacatgccctggagacattttccccattgtcttggctattaatatttggttccttgttacttatgcaaatttctgcagctggcttgaatttatccccagaaaatgagtttttcttttataccatgtatcaggctgcaaattttccaaatttctatgctttgcttcccttttaaacacaacttccagtttcagataatctctttgctcacacatatgtgaacacacctctagaaaaaaacaggtcacctcttaaacactttgctgcttagaaatttcttccaccagataccctaaatcatctctctcaagttcaaagttccacaaatctctagggcagggcaaaatgccaccagtctctctgctaaagcatagcaagactgacctttgctccagttcccaaaaagttcctcatctccatctgaaaccacctcagcctggacttcattgtccatatcactatcagcatttcagtcaaaagcattcaacgagtctctaggaagttcctaactttcccacatcttcctgtcttcttttaagcccttcaaactcttccaacttctgcctatttcccagttccaaagttgcttccacattttcaggctatctttataccagtaccccactcctggtaccaatttcctgtgttagtccattttcacactgctataaagagctgcctgagactgggtaatttataaagtaaagagggttaattggctcacagtttcacatggctggggaagcctcaggaaatgtacaatcatggcggaaggcaaaggagaaacaagtaccttcttcaaaaggaagcaggagagagagagtaaagggggaacttccacagacttttcaaccatcaagtctcatgagaactcactcactatcatgagaacagcatgggtgaaactgcccccatgatctaatcacctcccaccagatcccccctcaacacatggggattacagtttgaaatgagatttaagtggggacacagagatgaaccatatcaccatctgaacatagaggcagagataggagttatactattacaagtcaaaaacacctggggctaccagaacctggatgagacaagggaggattctctcctatatgccttagaaagagcatgatcctgccaatacatttattttgaacttttggcatccagacccataaaacaataaacttctgttgtgttaagccacccagtttgtggtactttattatattgccctaggaaatgaatacatgaggacaatatgtaagtactcaataaatttaaaacatacttagttgttatgaaaatacccaaaaataatcataattgtgtgagactgctaggatgaatatttactcctgattttctaaatgttgatcttatataattttaaatggttaattaatatgaagatttttttattcagatggttggtatgatgcttttacaatatttactactctgcaccatcttagagatgaccattgtaatcataatcatccagtgggttgtaagagcatttcatcatgaaaaacacactgaagaaagtgagtaactttgtttctggcagtcaaatcaagataaaggcagtttataataagggccctctctgagagttcaaagtttagacttggtgaacaggagtgttgcttcagaagtaaggtcaagtgtatctgaaaacatgctgaaatatcttctgcttgatattgtgtggaattgaagtcaaacaacttgccctggcaaaactatgtagaagtcttttagacttacatctcccaggagattaacagaggaaatatatagactaaaagggtttcagagatcatacttgtgatatggggatactgactgctataaacccaaaaattcaaatttagttctgaaatgttggtttccaacatttggaatatcaaatgccttcagaaaataaacattttagaggacactgaaaagagtacttctagaatagaacagtaagaacctccaaaaacccatctctcaataaaagcaatgagaatactgaaaaatttgtcaaaatcaactttttcagaactttggaaattagtcaaagacctatgaaaatccaataagcatttattcaagttaaatggccaaatcatggtaagaacagtgagctctatggtattgcagcgtgccctattcccatccgtcttaccctatctcctcagtagcctttaaaagtaacagccttgcaaccatagtacctgtgggaaaaaacggcctaacaacaacaggaaaggataaaataggatttaagtgccccaaaaaagccccattctcagagaattgttgttaacttgtctggcagctccccagacatccccactggcaagactctttaatttgatttcattcagaactcagtcactgtaaacagcttttctttctgggatatttgtcagaacaatcaatagcatttaacaacacagctgcctgaggcagagataacagttgtgccaaacaaaaggtcacattttaaaaaaaaatctgagcagtaagatgtccatagagtattttgaaattatgacaatatctggaaacataaaaggtcacatgcatatgctgggatgtgtacatgccaagaaaagacctgaaaaatgtcctaacctcccacctctggctgacctgaagaaaatccaattcaaccattcaagttaaatggccgaatcatggtaagaacagtgagctttgtggtattgtaacttgtcctattcccatccctcacaacccatctcctgcttttatgataaaagcaggaagtgatagctaaggcagagttgcaaactctcccagagctttaaaaccttaccccaacacaaacacatgcaaacacgcacacacacaatctctcagcaaagtctaggaaacttactggttcaaaagaattaaggaaatctttgtccaatcactagctgaccactaagttaacaaagcagaataacaaagacaatgataaaaccaacccctagagggctatgatttacaatgttgccacactatattattttaaatgttcaatttttaacaagtaaaaatataaaatatgcaaggaaacagagaagtatggcttaaatacaggagaaaaaaacagtcaataaaaattttccccaaagaagtctaaatgttgaggttactagaaaaaaaaggtattttaactcagcaagtataaataagtataaagaacttttaaaaaccatgtctaaaaaaactaaaagtatgaacgcaatgtctcaccaaaaagagaatattaatagtgacataaaataggaactatttttccaaaagaaccaaatagaaattgtagagcagaaaattataataactaaaatgaaaattttactcaagggtctcaacagaaaatttgagctggcagaagaaataatccacaaacttgacagtaggtcaattggaattacctaatctatgaaacagaatgaagaaaaaagaacagagcttcagacacctttgaaacatcagcaagcataccaaaatgtgcataatggtgaacacataaggaaagaagagagaaagaaataaaaaaatggcacagtgagtttgtgaagaaatattggaaaatgtatagctgtaaagactatattttgaataagtatctgaaatcaaaaacccaactttcccccttaaaaaatcaggaaaagaaaactaaacctaaagtgaaaataataaagactagagtagaactaaatgaaatagaagataggaaaacaatagagaaaaacaataaaaccagaagttccttctttaaaaagaatcccaaaataacaaaccattaaccacactgaccaagaaaaaaagaaagaagacttaatttactataattataaagaaagaacattactgacaatgttatagaagtaaaaatattgaacaatcatatggcaacaaattagataacctacataaaatggacaaatttctagaaatacagacatgactgaaactgactcaagaagaaatagaaatctaagtacacctatcacaagttaaagaatcaaattaataatcaaaaactttccataaagaatagcccagtctcagatagctacattgtgaactctaccaaaggtttaaagcattaatactagttattcacaaactttttcccaaaaaaaagaggaggaataaatacttcctaactcattctataaggctaacactagtttggtactaaaataaaacaaagacattataataaaaggaaactatagactaatatccattatgaatatagatgcataaatcctcaaaaactattaacaaatggaatctagcaacatacaaaaagtattatatatcatgaccagttaggatttatcctaagagtacagagctggttcaatatatgaaaactaatcaatgtattccaccttactaatagaataaaagccagaaaccacatgatcacctcaaaagacatagaagaagcatttaagaaaattgaacacccttttatgattaaaaaagttgaaaaactaggaatagaatggaattttctcaacctaaatatgggcgtttattaaaaatttatagttaacataatacttgataaagagacactgaatcattttcttcttaagataagaaacaagatatcttgtcacttacattcaacattgtattgtaggttctatccaggaaaatcaggcaataaaaaataaagaatttagtttaatcaaggaaaaattaaaactaacactctttacaaatgacattatctgatctcgtataaaatgctaaaaaaatccataaaaatctagtcgaactaataaataagtttaacaaaatggcagaatacatggccaatatacagaaaccaactgtatttttgtatacaaaaacacagttacagtaacatcaaaaggaataaatatacatatacttcacattcaggaataaatttttaaaaagaagtgcgagacttgtctaccacaaactctaaaacattattgaaagaaatttaagaagatacaaacaaatgaaaagacatcccatgttcattgataaaagacaatatttgaagacaatattatgatggtaatactccccaaccaatttaacacaacccctgttaaattacagctggcatttttcagaaattgacaagcttatcctaacattcatatgaacatggaaaagacccaaaatagtcaaaccaatattaaaaaagaaaaacaaagtaggaggtgttaggttttgaagggaaggtaagggttaaagaaagacacacacacacacacacacacacacacacacacacacacacacatataaaaagggcacctcagcagcaaatgcaggctttacatccagcataaaacctacagaagtggggaaccagtgtaatgccagagcccaccgctgcttatagcctgggggtacttataggtatgggtgggaggggtctaggcagtacggcttgctacccagcaggatattgataagatgttcccatgatgaggtggttctggcccttggtttggcagaatgtcattatggtgttccttggacctttgcccagcaagatataatagggatgtttctttagttgggcctttgtctgccttgtggtcatgtggttaggcagaatgtttctcacggcccgaactcctgtgaaatgtttcactttgaccaaggtctgcaaaatagcagagaatttacaaaatggtgcagtttggactaacaggaaggctcgcacttcctagtttcaaaagttactaaaaaattacagtaatcaagaaattgtggtgtagcaggatgagccgtggacaaaactccacagacactgagaaagtgaaggaagtagctttaatcagctggaagcatcggcagactagcgtcttaaaatccaagcttgttgagtgcacaatttctgtcccttttttttttttagcgctcacaatactaaaggtttcgcatgaaagggttgtgattgattgagcagtctagggtggtaccggacaggggctgcagctacatgcaccagtaatcagagtgaaacagaacagaatggaaaatttgttgtatgtccttccacacaatgtctggaatctatggataacatcagttgctaagtcatgggttgaattttaaccatcaggctaaggtcaggcaggcccaggcctggttttgggtctggttttgggtctggtgcctggcgccaggctgcctgcctttggtttcgcttccttgtttcttcttaaaacaggtactgagtataaaacagtatagaacaatatgggggggtctctttctttcttctctcagtgatactgccataatgatagacataaaaatcagtagaataggatcaaaaacccaaaaataagttcatacgtagctacttgatttttgactagcatgacaagacaattcaatggagaaatagtggtctcttcaacaaatggtgccaggacaactggatatctgcatacaaaagaatgaagttagaccactacctcacagaatatacacaaattaactaaaaatgcatagacctagatttaagagctaacattacaaaactcttaggaagaaaatacaggcataattatttctggcctgaattagttaatggtatattagctatcacaccaaaagcatatttaacaaaagaaaaatcatagataaattgaccaagggaagaaaactacagaccaacatgtctgatgactacggatacaaaaatcttcaaaaaaaaaactagcaaaccaaatctagcaacatataaatatgattatacaacagggtcaagtgagatttattacaggaattcaaagttagtttaacataccaaaatcaatcaatgcaatatatttcattaaaataataaagggcaaaaacatgctcactaaacaaagtgatgaaaggaaatagattgtaatggctgatgattttatctccttacttatctatcttccctaaatcctttcaaaatagataattaattccaaaaacaaaaatctgtagtttggtgtcaacctaaaactctgtcaggagccaaaggaatggcttgtttgtggaattcctgtaggataatatgtgggggatcatggcaggaaatgaggctgtagaagtaccttgagaccagatcttaatggggcttaactataccttattaaagaattttgaatttagtctatagataccagggtgctcttgcagggtttttaacaacagtgtttcttgatcaaacttttcatttatataattattttcattagaatatttcctgcagcaagttacagcccttcccccctaccctcaactcaaactgctaaatcaatcaggaatcatctcatgatcataagacggcttaggcagcataatttccggttcacatccagcaggagaaactggcctttctcagaagctacaaggagacctctctttacttcacttggcttaattgcctcagatctgctaatctctgagttgagtaatagcaaagggaataggattaccatgaaggattcagacaaatcatttgtagcaggataattttgagggagtcaaccagtgtcctcagtcattctgggaggaaaatagagatagagataggaaaaagaagaacaaagctagagatgaatataattagctggttgccccaacaggcaagccaaacaatgagtacctaaacctaaacaatgaagaataaagagaagatgataaatttgaaagatatttaggaggcttattaatgtcttgtatgttcgtttcacactcaatgttaaatcttagattaaataaaattagtttaataaactgcttatcccttatttctatttcccatactgctcaataactattgaacatagctttaaatactaacctgtattttacttgattaggaaactattttttaaatcatgtattttcagttttgtgtgtatgcgcttatacgatataatattctgctgtgaacttaaaaacaaaatagaaaaacagaggtttactcaagaaaagaatgacactgttcccattagaatggcttctacagtggctcccaaaaatcctgtagtatgagccagatggctctccgctccaatggttgttctcttctgatctagaatatgaagtagagtacccaagaggaatcaggactcaccagagtccagttaaaatcattttaagaagaataatttagtttaatatgtttgttgtagttcattgaaacctctggtatctgatgagttataggtctgatatgcctttggctaggccccccagaactgagtaggtactgtcttctcagtacacttttaactaaccacattccaggtttacatatttgttcattttttgttgttgttttgtcttactttaactcaatgtctcaggataaggcttttattttagactgtaataatgatcaatttgctatctcaattcatctcaggcactttgccctcggaaatctcactgtcggaatccttggaaatcacaccacgcacaacttctatttcttcataatttgcaaagaaccagtgtgactccagtcaagaacaaaagattaattgtgaattagcgaagaactctaattttttcaagcagccacatggaaaacgcattctaatgaaatcctttccattgctcttttttcttagttcttcaataaagcatgcgatttgatcacaaattgactcttccctttttaaaagccagtatgggttaacacggataaatatagcccctgcaatccctgtggttgaagggatgtaggagagtagtgttgaatgcccactttatcttaggttggaggagattggcttgaattaaggaactccttcatccaagaggagaaaatactctgattttggaagttggcataatgttcatgtgataatgtcaatactcttgctctctctgtacttttgttttctcatctgtaaaacagaaataatagtctctaacccacagagtagatgggaggattaaatgacaatatatcattaaaagagcttacaacagctcctaactcatagttgtccctcaataagtttttattatttattatttatcagctcttatcattgtatcagtagcataatgatatatgaagccagattgaatttttcttgttttccaagaattggtgactagaacctccctctgaaagcagatgtactgaaatgaggccacaaaactacttaaaatcttgatgaaaatgttatgtattgagttgtgtccccctcaaaaaaatatattgaggtcctaatccccagtactcagaatatgacctaatttagaagtagggtctttaaataaccaatcgaattaaaatgaagtcattaggagagagtctaatccaatatcactggtttccttataaaaagagaaaattgggccaggcgcagtggctcacgcctgtaatcccaacactttgggaggccgaggcaggtggattgcttgaggtcaggagttcaagactagcctgaccaacatggtgaaatcctgtctctactaaaaatacaaaaattagccgggcatagtggtgcgcacctgtaatcccacctactcgggaggctgaggcaggagaatcacttgaacccaggaggcagagattgtgatgagactagatcgcaccattgcactccagcctgggcgacagagtgagactctcatctcaaaacaaagaaaaggggaaattagacacagacacagatatgcacagagggaaaacgatgtgaagacacacaaagagaaaaccatgtaaagatgaaggattgggtgatgcatcgacaagccaagaagtgccaaagatttctagcaaatcaggaggacgtcaggaaggatccttctcctccaggtttctgagggagcatgaccctgagagcaccttgattttggacttccaacctccagaacagtgagataataaatttctcattttaacaccttgttttaaccactcgttttaaccactcgttttaacaccttgttacattagctcggggaaactaatgcaggtggcttttcactataaggggcactagatttcccccaccccatggaacatgttaggtgtttatgaaagcaggttatcctctcacctcagcattccacagtaggagtgcagcattcgaacggctctactctctgaagctcggggagagaagaagcagctgtaaagtgtgtggctgtttacaggaagcatcccactccccaacgatagtctttgggacccaggtgggacttgctgacctgatctagaaaagccagagcaaaagccagcaatgttaaaaagaaggcatggtataggagcctgcagagagggaccatggaccactcctaaaagtcggagcttgcaagaggtaaaaaagaaagatacctatcaccactgcctgcaggccccaaccctggaacactagagggaaatgagactggaagcctcaggttacctgagaattgctgtagcatggggagcaaggcatatgaaagcacttcagcaaaatgctgccaatggagggtcagtacgaaggtgtagccaaattaccaaagaagcactaatgcctaggagagagcttctcagaattgagtggctcttaactgtggccagtagaagcttccacatacctgcctaggttaggaatataatccacagaaagagaactatattctgacatgggagctcatttaatttcatttaatttttttaaaataaaggtttttttatatgtataaaatttgtcattttataggcatattttaaatgtggatattttaatttatatcataattgtataatttatatgcatattttaaatgtgcatattttgtaacataatttttaaagcctctgctgtgaacattacatattgaatgtatatgtttgggttgtctgttgtttttcagtcttattctgatgttatctccaggagtccaccatacaatttctccagagcctctgttacatctatcttcttccaatccatccttgatacacttttaaagataacagcacccaagatcatgttaagtactagagactgaacatatatctctacagatagtgggatctctcatagttcaaactttgtgtgggatagttttctaattccccattccatgtaataacaaaagaaattaatactgtatttgccctggttaattatgagactatttctcactttttctacttcagcactctgtaattggcctcagcctgttctgcctacacagattaacattatatcctccttcctcctatattagatgaataagtctgttcttttattatctcattctattctttattatttataatagtaattcccattaatacctctgctctttcttttttatatattttttgtacatatgacttctgatctttttctcttacatacaaagtattattataaaaatgtacaggcatatctaattattatgtatttcagtatattcaggtctgacattttatataataaaatggatattttataataaatttacttgccctttatattacagttaagcattatattgatctcttaaattatgtagatctcattatttgtagtttgtatctcaggatatgaaaaatattaactctacatttattttactgagaaatttttaaaccatctagattttgactaaaagtcttagtacagacttttaattccatccaatgtgaaataactgatatcagatatactgaaactagctacaaaaactggggaaaatgcataaaacatcaatttttaggcactgtacaaaaaccaacagaaggtttccattctttggaaatgggaaacatacaaggtgagcccccacattcacccagacttccccttgggaacattttccaggccatgtggtaggaacgtagaacccaaatagttacagtggtcttgctggatggaagcagagattaagtttgaaactgctaaagtagctggaattcgatgggcatacctacagagatagggaagctactgaacagatacctcagaagtctacaaagaaattttccttaggtccttagctgaatcctggccatatcctttaatacaacttcagaaggcctaacagaaagtaaattcctggccgggtgtggtggctcacgcctgtaatcacagcactttgtaagggaggccgaagagggcagatcacttgaggtcaggggtttgagaccagcctggccaacatagtaaaaccccatctctactaaaaacacaaaaattactcaggcatggtggtgggcgcctgtagtcccagctactcaggtggctgaggcagaagaatcacttgaaacaggagacggaggttgcagtgagccgagatcctgccactgcagaccagcctgggtgacagagcaagaccctgtcttaaaaaaaaaaaaaaaaagaaaaaaaaaaggaagtaaattccagggagactgagagctgagcatggattcttgatcctacacagtgtggtgagtggtgaagtgcaggcgcagccaaaagagagaaaccttcttgatcatccctgacattcaaaggatactccagagatgctacagcttctaattaagaacgatgaactaggagtacaggctacaccttggaataagaaaaagggagaaaaagacgcaccctaacaaagcctaaaatcaggatgcaagatgatctgcaaaaatgtaattgctggtgtgcctcctccaaggagaggaaagagaatagtacccagatcctcacattttgaacagatcatctaggaaagaacacttggatacagcagagaacagacgagaaacaccagcagtaagaaaggacatggtgtgaggaagcttgcccagccaggaactgaccaagagccaagagaggctcctggacctagggaaacaggaagagagaaacccctagaactccaaaatgggcttttatgatcttggctatgggagaaaccctgtagtggattcacgacagcatcaggcctggcatatggagcttcctaaagattgcacagagatgttgccccagaaagggaacccacacagaatcccacaagcttcagcacccagagcagcctcagctgggagccattttgagagcctggataccgggtatctacagacacagctgctgccactgagcagctccaaggagggagagggaagaacaggtgctcccatgcaccaatgagagggtacctgccgccctgctatgggctgcagttgagactgagacataaatgagccacgttccccacagcttcttgctcacactgcttgcctgggagatgccccaccgtctctggtctaaaccccaaggcaccatcttaagagttgagtgctggactgtgccctgcccttgggctgaggtcaaactaacacaattacagctgctgcctagccaaggagtgacggggaaaccaggctatctcatgcaaatataggacaatacccactgatctgcaacaggctgctgtgagactgagacgtgaggggatgacactccccacagcttcttacatatgcttcttgcctaggagggaccccaccctccctggccacaggcctaaggtgccattttgagagtttaatgctgggctatgccccacggtcaggccaaattcaagttgacatggctgcaactactgcccagtcaaggagggatagggcagccaggctttccgacgcatacctaggacaatattcaatgccctgccataggctgctgcaagaccaacactcaagcgaaccacacttctcacagagtcttgcccatactgttcgcctgagaagggcctgaccctctctggtcacaagcccacagctggcactatttttagagtttaacactaagctgtgccccacccttgggccaaggtcaaggtgacacaacagcagtcgccacccaactgagagagagacaaggaagaccaaggtctccaaagcacacttagaacaatacccactgccctgctaaaggcagctgtgggaccagggagtaacccaccccaatccattgcagcttccagcaacaccaacacagatggcatgggtcactgtggtttcctccaccactgctactgccacaccacgccagcttcccaggggcctgagactccacccacacaccaggcccactgctcccactgcccacttctaagcaagcagcttggaggcccaagaatgagccctctaggaccgctaacacaagggccagtataagccactctggagccttaaaacaggctcgctcaccccaatgctgccactactcgggcccaaagactggctcagttggtgtattagtttgttctcacactgctatagagaaatacctgatggccaggcacagtatttgggagggtgaggcagacagatcacttgaggccaggagtttgagaccagcctggacaacatggtgaaaccctgtctctactaaaatacaaaaattagatgggtgtggtggtgcacacctgtaattccagctacttgggaggctgaggcatgagaatcacttgaacctggaaggcggaggctgcagtgagctgagatcgcaacactgcactccagcctgggtgacagagtgagaccctgtctaaaaaaaaaaaagaagaaagaaagagagagagggagagagagaaagaaagagagaaagagagaaaggaaggaaggaaggaagagaaagaaaaaaagaaagaaagaaagagaaaggaaagaaagaaagaaagaaagaaagaaagaaagaaagaaagaaagaaagaaggaaagaaaaagaaagaaagaaagaaagaaagaaagaaagaaagaaagaaagaaagaaagaaagaaagaaagaaagaaagaaagaaaaagaaagagaaagaaagaaagaaaggaaagacctgagactgggtaatttaaaagaaaataggtttaattgcctggtggttccacggactgtacaggaagcatggcagcatatgcttctgcagaggcctcagggagcttttcctcatgacagaaggcaacatgggaacaggcatcttacatggtaggagcagaaccgaggcgggggggtgccccacacttttaaacaaccagatatcacacaaactcactcactattgtgacacagtaccaaggggaaaatctgctcctgtgattcaatcgcctgtcaccaggccccacctccaacactggggattgcaattcaacatgagatttgggcagggacacagaccaaaaccacatcagttggcatctaagtccccagctaaaagtcaccacaaccttaactgtaccataagtcaccaaggcaatcccagagaccactgactttgtgtactgcgaaagaagtcaaacaaagatcacactactgccagcatgcaaaatcaaagtcgaagtatcttaatcaacaacacgtacacaacctcagaaaaaaaaaaaaaattcccctaccaaagcaatttcaaaaaattggaacaagcaactgctacactagatgcaaagacatcaatggaaaaacacaggaagcatgaaaaagcagggaaatgggatatcatcaaaggaccataattgtccagcaacagattccaacaaaatgaatcccttgaaatgccagataaataatttaaaatattgatttttaaagaagcttaatgagatgcaaaggatatctgaaaatcaggccaggcatagtgtctcgtgcctgtaatcccactgtaatcccacactttgggaggccatggcaggtagatcacatgaggccaggagttcaagaccagcctgggcaccatactgaaaccctgtctttctactaaaaatacaaaaaaaaatgtaagctaatacaagaaaatcagtaaatcaattcagaaaatgaaagaaaataaaatctcagtacctgaagacatgtcttttgaagtaattcagccagacaaaaataaggaaaaaagaattacaaaggataaacaaagcctttaagatatctgagatgatataaaacaaccaaacttacaaattatcagtacacccaagggggtagagagattcaaaagtttagaaatggccaggtgtagcggctcatgcctgtactcccagcaatttgggaggccaaagtgggaggactgcttgagatcaagagttcaagactagcctaagcaagaaaacaagaatctgcctttacaaatttttttttttaaattagccaggcatggtggctcatgtgtgtcatcccagctacttgaagggctaaggtgggaggattgcttgagcccaggagtttgaggttgcaatgggccatgattgtgccactgcactccaacctgggtgacagagtgaaacaaaacaaaacaaaagcttagaaaacatatttgaggaaataatcaataaaaatgtcccaagaatatcaagagagttagacataaagatacaggaagtccagtgatacccaggcaaacacattgcaaaaaggatctcaccatggcaatattatattcagaatgtctaaagtcaatgagaaagaaagaattttgtcagtaacaatacaaaagtttctagtcacctataaagaaaactccattagactaacagcagacttttcagcagaaatcttacaggccagaagagaagggaatggtattttcaaagtgcttgaacaaaagaactatcagccaagaattttgtgtcctgccaaaataggtttcataaataaagtcctttccaggcaagcaaacactgagggaatttgtcacccctacaaatggtcaccctacaggaaatgctcaaagaggtcttaaacatgtgaatgaaaagtcaatatccatcatcattaaaacccatggaaatataaaacttacagtttgtataaaacaatcacacaaaggaggaaaagaaaggaatcaaatggcaacatgacaaaattttactaaaccacaaagacaaaaagacagaaacaaagaatctataacttgaaatcgatcaacaatatgacaggaacaaagcttcacatatcaatattaaccccgaaagtaaatggactaaatgctccactgaaaagatgcagattggcagaatgggtttaaaaaataatccaagtatatgctgcctacaagaaactcaccttacccacaaaaacacatataggttgaaagtaaagaggtggaaaagatattccaagcaaacagaaataaaagcaagcaggagtagttatccttatgtcagataaaatagactttaaatcaaaaacagtaagaaagaacacagaagggcattacatagtgataaagtgatcaagaagatgtaacaatcctaaatatatatgcacccaacattggagcacccaaatttacaaaacaaatattactgcagaaaaccaaataccacatgttctcacttataagtgggagctaaatgatgaaaactcatcaacacaaagggaacaatagacactgagatctatttgagggtgaagggtaggacgaggaagaggagcagtaacataactattgggtactgggcttaatacctgggtgatgaaataatctgtacaatgaacccccatgacataagtttacctatgtaataaaccttcatgtgtacccccaaacctaaaaaaacacacacaaatattactacacctaaagaaagagaaagacgagaaaggcagcaacacaataatagtgggggacttaaccaccccacttgcagcactagacagatcatagggagaaaaaattaacaaagaaacattggccttaaattggactttagaccaaatggatttaacaggtatttgtgcagtggtgcaatcttggctcactgcaacctccacttcctgggttcaagtgattctcctgcctcagcctcccaagtagctgggactacaggcatgcaccaccatgcccggctacttttttgtgtttttagtagagacggggtttcagcatgttggtcaggctggtcttgaactactgacctcagatgatccaccctcctcggcctcccaaaatgctgggtttacaggcatgagtcactgcgcctggcccagaatatgcattatttttatcagcacatggaccattccccaagatagactacatgttaggccacaaaactagccttaagaaatttttaaaaattgaaatcatgtcaactatcttctcagatgacaatgcaataaaggtaaaaatcagtaccaagagaaatttcagaaagtatacaaatacatggaaactaaacagcatgctcctgaacaatcactgggtcaatgaagaaattaagacagaaatttaaaatttttatgaaatgaaaagaaaaacacatcttaccaaaacctgtgggatacagtgaaagtagttctatgagggaaatttatagcattaaatgcctacatcaaaaaaagcagaaagatgacaaattaacagcttaatattgtatctcaaggatgtagagaaacaaggagaaatcaaacccgaaattggcagaagaaaaaaaaaaagatcaaggcaggactaaataaatcagaaatgaaaaaagaataaaaaggatcaacgaaatgaaaagtttgttccttgaaaagataaaattgataaaccactagctagactaataaaagggagagaagattcaaataaacacaatcagaattgaaaatgaagacattacaattgataccacagcaatacaaaaggctctgacataaggatttgggtgcttacttgggaagtgacccaagactcactgtgaaaaaaaatggaaaagtgataccaaaaaaaggaagaaagtcaatagactatgtattaatgaatgagttctgttatagggaactggtgcttaatcctgttggagactctctaagagacagttgaaacacacttcaaaattatttctcttaggggacagagaagctagggtagttatccagcatatgcacgttacactggataggaaaaattcttgtgggattaacttcccagcacctatggcctgccccatacctatgcatcctcggaaaagaaaggagttgtccatagatgtggagactggctgaagatgcagcatcaatacagcatttgctgcagagtttgctcagagtttgaggctgcagtgagctatgatcacgttactgtactctagcttgagcaagaccctgtctcaagacctccagagtggatcaaggggatatagatgctgcatcaacagcatttgctgaagtaggtttggacaataataatctcccttgtatgtctccggtcccttctagaaagttggcaccacttctataaactcaattaaaaggtgacaaatttcatcttctacaatatctggttaaacctggtcctgaatgtcccacgtgcactagggcttagccacctatatgtcctcattcagatgcctcttattatttctgtcaatacagtttggttcatgttattcgtctttacaaaaagctattgagttactttatagagttagacaaatgctaaagttcatttggaaaaacaaacatgcaagaatagccataaaatataatgaaaaaggaaaaattacacaggagactaaccctacaggacattgaagtacactggaaagcctctataattaaaacattgttgaaataacacatgaatagacaaatagaccaatagaaagtaaaagaaagaccagaattagaaccaaatgcatatagaaatttaggctgtgacaaaggtggcatttcaaatgccgctgaagagaagatgagctatttaataaattgccctggggcagccaggtagacttttggaaaaatttaaaattagacccacatctcatagcattcacaaaaaaatacattttacatgtattaagaatcaaaatgtaaaaagtaaaacaatacaagtattagaagaaaacacagctaaattcctgtttaatcttagtgttaggaaaggctttcaaacaatgactcaaatgcataggtaataaaagataagactgataaattttactacaaaaatttttaaaatttttcttgacagaaaaccaccctaaacaaaatcaaaagacactgtcaaaattggagaatataccaaagacaaagacctaaaatccctagtatgtaaagaactctttaaaaattaagggacaaaggtccaggaatctgatagaaaaaatgggtaaagaagtaaaatttgggttaggcatggtggctcactcctgtaatccctgcactttgggaggccgaggcaggagaatcatttgaggccaggaattgaagaccagcctgggcagcatagtgaaatcctgtctctacaaaaaattttaagatttagctggccacagtagtgcgtgcctgcagtcccagctattcaggaggctgaggcaggtggattgcttgagcctgggagtttgaggctgcagtgaactatcactgcactccagcctgagcaagaccctgtctctaaaaaatacaaacaacaacaaaaaagtgaagtctgactccagctaccttttcatcttttttacattcaatgtccttcactgtgagccattcccaacatatctctaccttctcttccccaagacttttccctttccataccctcaacggtgttctttttgttttgaccatcttacaatgttctagccatcccatcaacttcatttgttcttcattgttcaccttcttcaacggtaaatctgtcatggactattacatgcagctgtttttgtactgtgcaattcacacgatgtatgtcatagatatgtggaatgccctcccatggatggcttctgattttctattggctctgacttggatgaaaatagatctaagttgattacaagtctcatttcactcgctgtgattctatccctttctggactgcagtttattgatttcatatgccaccttctgtttgaagtcttccctaatctcttcaagtccaacaaatcattttctcctctgttctcctgtggggacatttatctctcttctgtggtgtttatttcatcctgtctcatgttacagctaaatacagcacaccctgggtgcccagttcatttctgtgtctcccagagcaaccagcccaaccctttcttctccatggagattataccatagactcttgtcaaatcaaaccatatttaactggctcattaaccaaaacaggaaataaatacgaatgaaactgagctctaagcagcatgtaacctggcctgcatccaggaaatagaggacttcggatccttctaaccctaccacccaactggccccagtacattcattctctcaggaaaaaaaacaaggtccccacagcaaagaaaaggaataggatcaagagatacgtggctgctggcagagcaaggtgagtctgcttaatctggtggttggtaactgggagttggtgataaggtttttctaccaagtgagacttacggcgaaccagtgtggatgagggatagacagagtgtattgtactagctttattgagtctgctccaagagaaagaaagagaaagataggacatggagggggatgggagaaacaaaaagaaaaagaatttttaaaaccacattagaatgtataagtagcctagaaaattgagcagtggaagccacccaatgaacagacactgccttggcaatggggcttcccttgagaaggataatctccatttaactaatattgacatacctgggaccttggaggattcttgtccactctctcaccctgtttccttttccagaaaatgagagaattgaactcaatgttgtccaagagattttctagttctgaacttttgctttcagccagtactaacatatgcaaagcagcactctaaacactatgagaggccgggtgcggtggttcacatctgtaatcccagcactttgggaggccgaggcaagcggatcgcctgaggtcaggagttcgagaccagcctggccaacagggggaaaccccatctctactaaaaatacaaaaattagctgggtgtggtggcgggggcctgtaatcccagatactcaggaggctgaggcaggagaattgcttgaacctgggaggcggaggttgcagtgagccaagatcgtaccactgcactccagcctgggtgacagagccagactctgtctcaaaaaaaaattaaaaaataaacactatgagagacacaaagatggaaaagatggaccccttgccctctggtagcctttagcctctttgagtcttagttttctcatctgtaaaactgggcgggtgagaggatgaaaggaaatgtatttgtaaagcacctcttaagtgccctataactgatatctattatttgtaacatgggattcataaacttgtagagggttaagatgctccaatgagctagaagaagcaaaagtcctttttaaaggacaagtccatatgtgagggaaaattctctcgcatttatttcttggcagcatgaattcgatgacttcagcagttccggtggccaattctgtgttggtggtggcaccccacaatggttatcctgtgaccccaggaattatgtctcacgtgcccctgtatccaaacagccagccgcaagtccacctagttcctgggaacccacctagtttggtgtcgaatgtgaatgggcagcctgtgcagaaagctctgaaagaaggcaaaaccttgggggtaagtgagatttccctttgcaggccacagactgcacagctggagtgatggcagggggaagggaaggcctgggaaatacacaaacactacatcccgcaagtggggctgagttgatcgcgccttgccaagcacaggtctattagaaagctcagctgcacaacatcacaggcggcctctgctcagaccttgtattttctgatttaggcattttcggaaagagaaagaaaagcaacaaaaaagcagcacgcttgaaggttgatcctgttgccaggatccacgcccagccctgtggcctctgaagaaaggggtcccagcaagaccaaaatagaccacaaggtggagtcagaatccaataagatcgaatcaaatatttgcccaacaggaaacaaagcaggttaggcaaccaacaacataaatggtcaccgcaacccctgagaggctgtcctgcgctggacaaagaaaggcccatttcactgtgtagctgaatgatgggcatgaatttggatgcagactgcccgagctccaaccctagctccaccctcagatagtgctcatgggaacaaaaattgatacaacccttagggagggaaatttgtatctgccaaatttacaaaatatccaataattccattgctggaacttcatcctccagatatgcctgtgcccacaaaaactgtgatatgtatgagcttattcattgcagcgtggtttgtgataacaaaaatattgtaatatccatcaatataataccggttaagtcagtatattggttaagtcagtgtaatatactggttaagtcagtgcatccaaagaataaaatgtagtggagctatgaaaagaacaagaaagctctttgtgtaatgatagggacacaccccaagatatggagttaatggaagaaagtaaggggcagacactgtgtataatttgcttacatttatgtgaatttaaggaagtaatatatttgtatttgctaccacgtgtgtaatatacaaacatacacagatgttctttcatttacaatgggattatgtcccagtgtacccatcgtaaattaaaaatatcataagtaaaaaatacatttaatacatgtagcctaccaaacatcatagcttagcctcgcctaccttaaacaagttcagaacacttaggttagcttacagctgggcaaaatcatctaacacaaagcctatttaatagtgttcttgaatatctaatgtagtttactgaacactggactgaaaatgaaaagcagaatgattgtatgggtactccaaatacggtttctactgaattcatgtcactttcacaccataataaagttgaaaactttgtttttttgagacagagtctcactctgtcacccaggctggagcgcagtggcgcagtcttggctcactgcaacctctgcctcctgggtttaagcgattctcccgcctcagcctcccaagtagctgggattacaggcacccaccatcatgccgagctagtttttgtatttttgtagagacagggtttcaccatgttggccaggctggtcttgaactcctgacctgtgatccgcccgtctcagcttcccaaagtgctgagattacaggtgtgagccactgtgcctggcccacatggcattttttataaggacaccaatcatattggattggagacccactctactccagtgtgacctcatcttggctgattatatctgcaacaactctgttttcaaatagagtcacattctgaggcactcagcattagaatttcaacacatgaatttggaggagggttgggggaggggagcataatttaacacataacaatatcctaaagaaataagagatgaaggcaaagatttacatagaaggatgtttatcacaatgttacatataatagaaaaaagtagaaataatcttacctgtccaataactctgtctcaactactccacagaccatccataatgggatctgagcagccctgaaaaaacatatgttccaagaatacttaatgccatgaggacacattcatgatgaaatattaagttaataaaattcagggggccatgttgtgctatcaaggtatatatttgaaaagaataatgggagaatacaccaaaatgtaaacagttgttttctccaggcggaggggagattacaggtagtttttatttcatttttgtatttcccatattactttttagaccatgaaaataaaacatttattaaaattaaaaggaggctcataggggaggcaggacccagcctcagaaacaagacttcagcttgtggctctcctgacaggccatccagatcatcattggcctggctcacatcggcctcggctccatcatggcgacggttctcgtaggggaatacctgtctatttcattctacggaggctttcccttctggggaggcttgtgggtgagtaactcaagtcctcctgccgatgagctcccagaaggtgccaaggcactcaaggccaccttgccaagttgtgcagctgtgccctgcagaaggttcccagccacccaaatgtgggggataggaaaccagccagccctggcctcgttccgcaagcatattagtttggtagggccggcccaacagagtatagcaccacaggttggatggcttaaacaacagaaatttgttatctcacagttctggcggctgaaagtctgcgatggagatgttagcagatgttttcccctaaggtctctctccttggcttgcagaaggtcgtcttctccctgagcctttccacggccttcctccatgcctgtgccctagtctcctcttcctatgaggacaccagtcattttggattagggtcccccctgatgacctcatttaacctgaatgacggttttaacaaccctatctccaaacacagtcagattctggagcactacagattagggcttcaatctacgaaatttggtgggggatagagggtgtggacacaattcagcccataatatcaagctacaaccccgcaaggtgacatcccctcaaaagggatgtattttctttttacttttttttttttttttttttttgagatggagtctcactctgtcgcccaagctggagcgcagtggtgcaatctcggctcaccgcaacctccccctcccggattcaagcaattctcctgcctcagcctccctagtagctgggattacagacgcgcaccaccacgcccggctaatttttgtatttttagtagtgacaagatttcaccacgttggccaggctggtctcaaactcctgacctcaggtgatccacttgcctcagcctcccaaagtgctgggattacaggtgtgagccaccacacccggccaaaagggatgtgttttcttaattcacaaagaaaacatccacatgtaaaaaatacactgggaatagcccctggcattgttggacataggcccacaagcctgagctccaggagaaaaacactcagcaaaggtgaagagtggcttcccagctgtagaacagcaagggtttgagtgcttgagcactggggactcaatctagatctgcagatgggctttgggggctccattttggcaaaatacctaatatgctaaatgtgtattatttttctggaagggtccatagctttcatcagattatcagagtgatccgtgactccataaagtgttaagaactacagtccttcttccacatcagtttattacctttatggttcctttgcagtgtccccctgcccacacacacacacacacacacacatacacacacacacatacaaacaaacacacatacacacacacacacatacacacacacactctctctctctctccttctcctcccctctccaccttcctttctcctttctctcccttctgttacagtcttcctcctgactcacacacctacatgtgacactaatgcaactttcctcataaatggcacaactccagagtaacctaggtgccagcccaagtccctctaccttataagagttaaataaaatagcctagagctatctccatccccgacagccacacaagttctgcaaatgaacagggctcctctagcgaggctctgcacacacccaaactcagaactcagcccctttccctcccacaaccactcacaagatacctgttcctgtatctctgaccttcgtggaatgtggggctatggagagggctagcatcacggccacccaggcctaccattgagcacacaatgcctaccacggagcactggattccaccaagtgccagtgagcagcaggcagttgtcctggcatctcaaatgcctcactgaccacgcctcctcccaccaggctgctgagtcccttcagccctcatgaccttcctccttttgctctgcagggcagttgtgctctttgctgccttcttgatcccaggactgtctttctatttcccaaagatcatcaatatcctcttctgaaacaaaggctcatctcctctggcacctcagaaggactgagagggataccaaaagtccagcccttcctccccatcaaatctctataaacagaagggtgtgagcctgagatttgtttttccactcataggagaatatggccttggccttggaaggcagaaacagctggaataagttttcactgtaaataactatgtccactctatggcacatgcatctgccgtgggtgggagggagtatggagtgagggttaggaacatggagtctgaaatcaagctgtctggatttgattctcaaatgcatgtgccatagagtggaaacacttatttacaatgaaaactccgctggatgatgttgtgtgagttgttcaaaatctctaagcctcagtctcctcattgataaaatggcaagagtaatactgcttgatgggccaccatgtggttaaatgaggcgaggttgaacaagtacttcatctgttggggggagggcggtgatgggttgctagtcggtacgtggcttcttttggggccgttgcaaatgttctaacttacattgtagtgatgattgcacaactttataaatatactaaaaataattgcataatatactttaaatgggtgaattatatgatacatgaattatatgtcaatgaagccttttctaaaaaagcattttctatagtgccccacaaatggtagctcctattaaatatagctcatgccctctcataccactcttgctagcccactgggcaaatgatggcaggcaatcccatcagccacagtgcctgcggaataccatgttggatgaaatgcacgcaattgacatcatcatcctcgtatttgatgttcagcatcatagcgacacaatgtttatctgagtaactaaaagttatttgtccagatatgcaggcaggcaaggattgatgtcaggcttctatctaaaagcagcagagaagacgctggtaaccccttccttctcccctccagagcccccaaacctaactgaatcttgatataaagattggaaaacaatagggtgtacttgtgggaaaataaaatacaaggaaataatccaacatttgagcatctactaagtgtaaagatatactaaatgccagatgtagggcataagttgtctcatgacaatgacacttgggaagagctataaatttttccattttgtagatgaggaaataaagacttagagaagttaataacttacccaaggtcaagagtttctagccagaatttaaaaccaggtttgctggatcctagaatatatatttatcccaccccagtgccttttcaggcagtgcaaaacagctcattttttctgttgcccatgttgagctgatggttccagcaaaggtacccactgtgtgtgaccagaatcacagaagcctggggaagggcaccctagcccctgacctctttctaaacccactctgttctgtaccagtttatcatttcaggatctctctccgtggcagcagaaaatcagccatattcttattgcctggtaagttacattctgagaccagctcttccaactggagacctatagaatggtgtcacaaaggggaaaataaggtcacatacgattcctcccccagccttgcacctactataaccagacacacggtgctcacacacattcccgctcatacagactggccacaggagcctggccctggagtcacatgtggaaaagtcccaagaggatgcagaagtgagaaggggcaatacagtcaccttagttaaggcatcagagtatggagagcgagagagagagagagagagagagataacagctttcctaagaagccctgccacagagaggcacagagctcccaggggcccagggctgccctctagcagaccaggagccaagagtacttccagtacagagaagaggactccggggaagccgaaggaggctcagtcactcgctttcctaaggaatccagccaacagaactctgataatcaacatggacaaagctttgtgctcccctagcaacagaccaagaaataccttcatttgtctcataatcaggttacgaagggtaaagggtgaccaggtccctacaaccagatgagatctatttgaaagtcttcaaaagaaagctcaaaatgtggaagcgtatctttctgcacatggcccagaatcatggagcatctgagcttatcacatcccaagacacttgggctaagattctatttatcctatgggacaaataggtcaagtgtttcccagagattattcttttttctttttctttttctttttttttttttttttttttttgtgtgtgtgtgtgagacagagtctcactgtgtcccccaggctggaatgcagtggtttgatctcaactcactgcagcatctgcctcctgggttcaagcaattctcctgcctcagcctccctagtagctgggattacaggtgcacaccaccatgcccagctaattattgtattttttgtattttttggtattttggtagagacggagttttgccattttggccaggctggtcttgaactcctgacctcaggtgatccacctgcctcagcctcccaaagtgctgggattacagatgtgagcatccgcgtccagccccaaagattattcttgagaacacttctcccatgatatgctcaatgaagatagttacatgaacttgggaaaatctctatgtattgtttcctctctgaaagatctaaagtcctcattaaaggctctgagaagtcccaccacgatgatctgtttacctttgcccaacccagctattttcaaagctaacttaccccaaaacctttcttgcacagaacacccctttacttgcagtggaaatagggttcctgggattcacattaagaaacactttttgatgaaaagagttatagagatggatggtggcaatggttgcacagcattgtagatgtgtttaatgctactgaactgtaacacttgaaaatgattaggatgttaaattttatgttacatatatgttaacacaattttagaaattggggggaaaaagaaacacttgttgggtctccattcatctcagctataacagcttttctcgcccatcctgaccctctgtgtcttcttcagctgtctggcagtttgggcttgaacatcgtcagtgcaatctgctctgcagttggagtcatactcttcatcacagatctaagtattccccacccatatgcctaccccgactattatccttacgcctggggtgtggtgagtatccctctcaaccaaagatcctctaagttctgaattagctacatttagaaaactcccagaaagggcttgacaaccaagctacctcactgaacatggtaggaaaaggaggtgctttcagcataggaacaaattttaaagtccttgacccatagctttaagcacatgacctttcccagtttgggtttctgcctttgtagaacaatacctaccttgtggcaatgttgagagaattaaatgcaattttacaaagaatgcatatgtgcccaccaaccagcacctctcctcacattctctgccttcttgcccattactataagccagaggttagcaaacttattctctaaagagccaatagtaagcagttaaggttttgcaggcctacagtctctgtcatgtagctatagctgccttacagcagccacagaaagcactaaacaaatgaatatggctgtgttctgataaaactttatttacaaaacaggcagcaggcaggatttgacccatggatcataattcacccacctctgctatacactagcactgtccaatagaaatatgcaagccacatgttattttaaattttctagttgccacatttaaaagagagagagagtgaaagcaacaggtgaaattgattttaataatctattttatttaaccccgtatatctaaaatattgtcatttcaacatgtaatcagtataaaaacttggtttgctattttgcatttggggaactaaatctttgaaatccagtttatattttgtgctatggcacatctcgatttgggaccagctacatctcaagtgtttaaaagccacatgggaattgtggttgctgaatagaacagggcagctacagatgagctacctgtgtcccacgtaaattcaatcctctgtctgcgcaactgagtccctcctctcctacctgctcaagttctcctcccctctccctcatcccgtctctcctctacatcatcagtctttccccctttgctggggcttttgcatcagcattaagcatgcttttgtttcttaaaaaacaaaccaacccacctcctcttcgttgtacttcctttatccactaccactgtatctctctggccctctttgcagacaaattcttaaaagaattgtctacactttagtgagtccaatcctcttctctcatattctctctgaacctgctccaattagactttcagcctcacttccctaaacacctgctcttctccaaatccccaatggggtgattgatccttcttctcggagggactttgcttgacttccaggctccaccctcactggttgccctcttctctgtctcctctgctagttctgtttttcccaatctcttaggctcaataattggttctctggttttctttctgtactcatttgtctatctcatttagtctggcaacttgaaacaccttgtctatgacaattgttctagaatacatggctccagccaaatcttctcccctatacaccagtctagcatgtccaatggtcaactcaatagctcatagttcatacatccaagtctgatctccagatttcacttcccaaaccttctctactcagttttcctgattccagttgatggcaactccatccttccagttgctcgggacaaaaccttggagtcgtcattgaccctgtctttctctcacacctcacagccaatccctcgggcaatcctgttggttctactttcaaaatgcattcagaatcccaccattttcccccagcccctctactcccacgctggcctgagccaccgcatctctcatctaatcatggaaacagcctcctgactgttccctttctcctactctgggctcactgcagctgtttatagcatggccaccagagggatcctttggaaacacaagatcccatcacttctctgctggcatcttactcagaaaaaaagccaatgtccttccagcagcctgaagatgctggccctctggtgccccccgcccctggctctgctgccatcctctggttctgctgctgaaccacgggaacctccatgatgttttctccaacactccaggcatctttccacctttgggcctggaatgttccctccgactggggaactcttccctcagatgttcccacagcttcctctgtcccttcctcacctccttcagatcactaatctgcaaccaccttcccaatgaggcctacctgaacaacccaacacccacactctcccagtaacccgcttcccttccccttatctatctttcctgtagtctatgcatctaacaccctctgcaactgacttatttgttacatttcatgcttactgcctgtccctagaatgagattcttaaggacagggatgtttttggtttcactcactgtcatacctcaaatacctagaactgtgtctggcacacggttgacacttcataagcatttgtcaaggaataaatgaatgtgccagctgtgatgcatactcagtaaacatcaacagccattaactgttgtttgtatttgaccagatccttttatcttcaagagacttaaagacttatctttccaagattcttaggcaaagcctctccctagagatcctatggaccaagtccatgtcatttatcaaaagtaccttgagtttctcccctcccagaaacattttatggctcccagatactttaggattaaagtccaaattcctcagccaggtatttgccctccctgggggatctggctctatctcactgtgccctacagttcacctcccttcgaatctctcactcaccctgaaccccagctactcccgtccactgcgagagacaggcacaagcgagtacttgggaattttcctgctgggaaagaaccaatcagggaggcatggactgcccaatagaagaaattaagaagcaaatgctggtggaggaactaagggaaaggaagatgggagaagagtttaggaaagactaaaccccaagcagcacagccaggtgccctggagtagagggagcagcaatttttgattcagaaaacttggcttttaatcttagttctgccaatgattgatcttggaatgagaactcgccccatgcccaccacccattccaccttcaagcctcagtcatcccatctgaacatggagggtcggactgcatctgagctttgcaaataatgacccaaggaatggagatactccggggtttccacatcaggaattatttttcatcaaataaaaaaaatctcagctgcttgagggaccccttttccatgaaatattttatgtgtaaaaaaattttatttaaaaaaaattgaaaaagaccagcatactttgcccaggccattctactctaagtctctgtgatccgttgacttagacatcctgcactccccttttcctgggacaactgcctctaccctcaccctctctaaatcccttcatgacaatgaacctctccctcctcagtgctctgggatacctttttgctgttctgtagctcttaccctatctgatgtgaattataattatcatctgcatctgttttcctactagattgtgcctctcaggatgcatttcttagccgcttctaccaagcagatgtttaataaccacttgctaaatggagaggaaggagaagaaaaggggctaaggagaggcctctccagaagagagaattctccaagcatctggctgtcaccaatgctgtttttaaaaatcataattgagataattgaggccggtcacggtggctcacacctgtaatcccagcactttgggagaccgaggcaggtggatcacttgagctcaggagttcaagaccagcctgggcaacatggcgaaatcccatctatacaaaatatacaaaaattagccaggcatggtagcgcgtgcctgtaatcccagctactcgggaggctgaggcaggagaatcgcttcaacccaggaggcggagctcacaatgctgagctcatgccactgctctccaacctgagtggcagagcaacactctgtctcaaaaaaaaaaaaaaattaaaaaatcataattgagaggcatttctttggtacctactgcatgccatccaccttcactatgaaatgttctcatgtcacataattggaacccaaatggtaatgggagtctcctggatggaccttttagattgaaactcgcttcccagatacactggaagactccatactcctgggtattcttgggtaacagcaaatggagggtttctatttctcccggttacctcctgctatggttaatttacttcattttggggatcctttcactgactgttcttcccaagccagagaaacagccccaattcctgccctccacaaaacaccactgtcacaagccaagaaagtcttttcagaggctgacattttcccaaaggttcagatgaaggggtgggttgccccttcacacctgtgggtgtttctcgttaggtggaacaagagacttggaaaagaaagagacacagagataaagtacagagaaagaaaaagggggcctaggggaccggcgttcagcatacagaggatccacgtgggcactggcctctgagttcccttagtatttattgatcattattgggcatgggtaataggataatagtggagagaaggtcagaaggtaaacacgtgaacaaatgtctctgcatcataaacaaggtaaagaaaaaagtgctgtgcttttgatgtgcatatacataaacatctcaatgccttaaggagcagtattgctgccagcatgtcccacctccagccctaaggcagttttcccctatctcagtaaatggaatatacaatggactttacaccgagacattccattgcccagagacgagcaggagacagaagctttcctcttacctcaactgcaaagagccgttccttcctcttttactaatcctcctcagcacagaccctttacgggtgttgggctgggggacggtcaggtctttcccatcccatgaggccatatttcagactatcacatggggagaaaccttggaaaatacctggctttcctaggcagaggtctctgtggccttccgcagtgttttgtgtctctgggtacttgagattagggagtggtttgagattagggagtggtgatgactcttttttttttttttttttttttttttgagacggagtctcgctctgtcgcccaggccggactgcggactgcagtggcgcaatctcggctcactgcaagctccacttcccgggttcatgccattctcctgcctcagcctcccgagtagctgggactacaggcacccgccaccgcgcccggctaattttttgtatttttagtagagacagggtttcaccttgttagccaggatggtctcgatctcctgacctcatgatccacccgcctcggcctcccaaagtgctgggattacaggcgtgagccaccgcgcccggccggtgatgactcttaacaagcgtgctgccttcaagcatttgtttaacaaagcacaccctgcacaacccttaatccatctaaccctgacttgacacagcacatgtttcagggagcacagggttgggggtagggttacagattaacagcagctcgaggcagaagaatttttcttagtacagaacaaaatggagtctcctatgtctacttccttctacacagacacagtaacaatctgatctctctttcttttccccacattcagagggatggtggaggtttacatcagagcccagcaaaccactgattactgaagataagacatccttgctttgggaagtcttcatttttcacaggaggccttttcctgtggcctcccccttcccaccatggcgctcaactccttctttttcctctaaccatctccctgttctctctgtgtcttgtccataccctccaattcctaccgacggcctccccagagcagtgtcactgctcccctctctgactccagagcacaccctcaggtctccacacccaaagcaacctatcaaggggcttccctaaacatggtcatcttttttctcagaggaacactaccaagtaaatgttgcaataacaattcttttacccccatacttgatacttacaaaaacccggtgggaaatttccccccacgaggctgagagaggataggggacttccgcaaagccacaaagagtccatggcagggccccagtgagaggtcagttcggactcccagtcccgtgctcctgtcctccccatctgctctgcctacagaaccctggaatggcgatttctggcgtgctgctggtcttctgcctcctggagtttggcatcgcatgcgcatcttcccactttggctgccagttggtctgctgtcaatcaagcaatgtgagtcccagggttcctcagtgggtggaaagatgcccccaaaaaggtggagacaagggagctctttgtgctttccactgcctgctcaggagcaggagtagttcctcggtgtccgaggcctttggtgcatggcccgtccttcttagcatgccccctgtgtgcctgtgttttccaggtgagtgtcatctatccaaacatctatgcagcaaacccagtgatcaccccagaaccggtgacctcaccaccaagttattccagtgagatccaagcaaataagtaaggctacagattctggaagcatctttcactgggaccaaaagaagtcctcctccctttctgggcttccataacccaggtcgttcctgttctgacagctgaggaaacgtctctcccactgtttgtactctcaccttcattcttcaattcagtctaggaaaccatgctgtttctctatcaagaagaagacagagattttaaacagatgttaaccaagagggactccctagggcacatgcatcagcacatatgtgggcatccagcctctggggccttggcacacacacattcgtgtgctctgctgcatgtgagcttgtgggttagaggaacaaatatctagacattcaatcttcactctttcaattgtgcattcatttaataaatagatactgagcattcaatgtgttcaaggctctcttcatggcaggagggggctggacattgacatgacacagtcttggacctcaagaaacttctggccttaggagagaggacaccaggacatcacgggagcaattttcactgacaaagggcaacataggggagaggcagaaggagcccagagtgaatttattctggctgtgatgcagaaaggaaggaatgaggagagcagaggacaggtctggttggggtagcaacatctgaatggggcattaaaggacagtaaggattttccgtgtaataagggaccacgtggttcaggaggccttcagagagaatgatcagtccttttagattctgttaccaatgaggcaaccaaattcacgaatgtgcaagaatgtagaaggaatcttccagagacataaggccaatacatcattatctgtaaaaggactaattccaaagagaaatggccatgtcattcctattaccatttctgcatttaccgtggtaacagcatctaaaaggactaatcctttcagcagacgactcactgtctccaaaggtctcccaaacagcgtcgtccctcatactgaaaatccctcactgtcctttaatggcccatttagatgtcgcttcctgaaacacgcaaaatttaaacattgttatgtatgataaccaatgggcatccaagaagttgcattctgtggggttatagcaatcatctctaaaatccagctgttgtcaagctttccttagctacagaagcactgcaaggatttgtttgtttgttgtttgttttggttactaaatacaaaatgtgattttgctcttgtaaataactttgttcttggggttatctaagaagtttcttctaaatggcatgcagttagaggtctatcgcctgtgcacctgcatcttctcattttctctgatcaggaatccttctgatgcccatcagctagccaggaacaggagtgttttcatttcctagaactaaatgggccttaggaattacagacctcctgaaaaattgattttttcaaatggaatatgaggcatgtaatatcctggttctagatcagtccttcacatacctgttttgtaagccaggaggttaggacattgagctccccaaaagggacccacctgtttgcaccgttctctgagggctcggtaaacagagcaagcctgcccctctcaccacctcctttcttattgctgcctcttgctgccccatctaactccacacctccttctcatcctacagaactctacccctcaaacctgaccctccattctgttcacagagcctccttcctgacatttctgacctatgagttaattcagatattgctaacatagctcgcttcctgcagtgtgggtcatcccagagaaagcactttctaatacatctggtgcctctccatatgggggcacctgaccctgccctcctgaaatcaccacagggcttgttggaacagattctttcctatcttatcacctactatattagtcctgtgttctaggcccttgtcctggggggaccaattgccaacctagggtgacagctcattgcataaaatgttatgcattctctgcaccaccccacaagccctccacccacagggctccatcccctccctatccactccataacaatggaacataaaacccggaagagatctcagagatctgtagcccacccaactatttaaccatagcactgtggcagtgcaatggtttaaatctcccctccaaaactcatgttgcaatttaattgccattgtaatggtatttaaaagtggagtctttaaaagatgattagatcataaggcctctgccctcatgaatggagtaatgccattattttgggagtgggttagttatcacaggagtgggcttctgatagaaggataaattttggtccttgtcctctctccgcctcatgtgctcatttgcccttcagccatgttatgatgcatcagggccctcagcagatactggcaccatgctcttggacttcccagcctccagaactgtgagaaataaatttattttctttatgaattacccagtctctggtattctgttatagcaatgtaaaacagactaagacaggtagagatggaaatttgcccaaggtcatcaacccagctagaggtatagccaggtccagaaccaggacttcagatggccggttcagggctccttgcagaaggaggagcatgtggtaaaaaaaaatcagggtgactaagattaaaacactgtcttcacttccttagcttgaaatgacacaggatccttcgggtgccacttcaccagccagagacttccgcagccagcagcacctctgctagagttttgctcatgactgctgagctggctcctcccacttggcccagcaggctgcgctcagctcatgctaccagcccggatctcacacccaccatgggcaagttaggcatggagcagaaaggggtgtgtgagcaagtgagtgagagtggggtctggccatggtacacctgtgctggctgctgtggtggggcaggcagctccaggggccagcacaggcacaagctctgtgcaaggctatggctggacaaggcatgccttaagtggcttccaccttgagcactggcatttggacaaggggaacacatggtgcctgaacacttagagatgccagcaactgcagagccccaaatgggtgttacagcatgtcacagctctggctcagggagtaccaagatctgggctcccataagggtcacagctcttctctcatagtccggcaaacgagagcatgtcaccacccatagctcggcaatctggccagaaacgtgtttcagcttggttgttttacagcttgtttggtcctgctgccctgctccagcccacagttcctgggctggcctggccctgccctgcttcccatcatgcagagcagctgcccagcgtcagtagaaggcaggagggatacaatgttacagctcctttcgcagctgccattccacgggtgctgggtttttgtcctgtgtccaggaagaatgaggttacatggacaaccagagagtgagcaaggcagagaagagttttactgagcaataaaacagctcttagtggagaagggccccaaagcaggtagcccctacccagaggtgggtagtcccacgtggctgagtccagaggttttatgggctttacgatcccagacttactgaattagcactctggggacaggatccagcaatctgtttttgaacaagcctgctgggtgattctgatgcacactctcaggtttgagaaccactgctccacagcatcttctcaaatgactgtttttctcattttgagtaccttctaacgtgatggcatacattatgatggtgtttacagaggcagcccatgccatctgtagacaattgtactgagaggctcttcttaagaatgaactatgtcaaaacggaatgaattacatcaagttttcatgtggaagattaaaaaaaaaaaagatgacccttcacctttagacttgcggaatcagagtattagataagactctgtctcagcccaaccacttgctgacagtctctggtaggttacgtcccccatgttccctttggtcaaccttctcccccttctcaccccagcaaggctagtatcaggtacactttttatgtctcataaagttaaatcaacaaccaggagtcaatacaaactatatagatacagagggcaataaaggcaaaagcagcaacattcgacttcacccaggtaagagggtaataaaattccataaaggacaacccagtgggccaatccacagactgccagaagcatcaggcaactgagcactccccacctccactactgaacactgccagcgtgctcgcacgggactggtagtgctcaataaatgtctgtcaaatgaacacaatcttatgaaaatggaagtaattaacatttattgagtctttaatgtctgacaacttattctgttcaatgccctttgataaaagaaaaacctcagccgaattaaatttaaaggagtttaactgagcaatgaacaattcacaaatcgggaagcccccagaatcacagcagattctcagagactccatgagtgcctcgtgttcagaacaaatttatacacaaaaaggaaacacaatgtactggaattggaagtgaggtacagaaacagtgagattggttatagctccgcatttgccttagttgaaggcagcttgaatagtcagtggtctatgaatggttgaagtatggccgctgggattggccaatgctcagctattgttactgatgcatactattaagttaggttttcgattttgtctgactattaagctaggttacagttcatccacaaggactcaaatatagaagtacagagtccttctcaggccatatttagtttgctttaacacctttcagctgcatgatctcattttgtattgcaaaaatacagagtggcattatctatgctttaggaaagagaaatatgaaaaatctggggctcagagaggttaagtaatttgcccaagtctgcactgctagtaaatgatagagctgggtcttaattcatgtctcctcactccaaatcccatgctcttttgccactgcaaaatgtatctctcacagttctggaggctgggaagcccaagaccaaagtaccagcagatttggtgtctggtgaggggctgcttcctggttcgtagacagcagtgctctcactatgtcctcacatggcagaggggccaagggagctctctggagtcttttattatataaagccactaatcttattcatgagcccctcatgacgtaatcacctcccaaaaaacccacctccaaatatcattacattgaggactaggttttaacataggaattttaggatgacaaaaacgttcagtctatagcacagagtacaaaaagcttattgatacagcttcagattccacactgcaagtaacctttcgggaactaacacttgagttcggtgtatcaggggttcttaagaagcgggaagaggtgaatttggtaacgtctggatgtattttttgttgccacaactggagttgagggaaagggtgctattggcatctagtgggtagaagccaaggataatgctgaacatcctacaatgcacaggacagccccttcatcaaagaattgtctagcccaaagtggcattaatgttgagggctaagaaagaagactaccagtaattatctgaaaaggctattaaaatactcacttttctaactaccgatctgattttcttcatatacttcaaccaaaacaacatatcaaaacagacaatatataagcagatgtgaaaatctagctctcttccagtaatccaaacaggaaagaggtatacatacctgatatggttcaggtcacacagccacaaaatgtagtgtcctagcaacggtgaaaacagcagaaacaggaaagtcatgctcacctttccctaccacttcttccctgaagcaactcataagaccctaattcgaaaggtaccctcccaaccctttgggaggctgaggcaggaggatcacctgaggccaggagttcgaggctgcagtgagctatgattgtatcactacattacagcctagatgacagaatgggagctcaaagacaaaaaaaaaaaaaaaaagtagaaaagaaaagtgccctccctacaccgagaggaaaggaacatccttatctctgaataaatgtggttacaaaatgatattaaacaaataggccttgctaatttcatcccagtttattaccattaagtcatggttttttatttaatcatacttcacaattattcacgtcctcatcaaacctagcataaaaagtacacaagtttatctgtttcttcaggtctttatttccttatgaagaccatcacatcaagcaaaacttatattaaataaatgtgtatgcttttctcttgttaatctgtcttttgtcaaaaggcccttggccataaatgtagtgatggttgaagaaaaggtatttctcctctcctatgaacctataaaacaataccactcttcccactaattttttttcattttggaaaatagaattattttttatttaaaaatatttatgttaatatgtaataaatattttattttaaaatagattagtaaatcatttttaagtatctccattttaatttctaatatggtataaatatcaacaaatttaacccacataaacaagtgttcttcgagagtacttaataacttttaaaaatgcaaaggactcctgagaccaaagagtgtgggtcctgagaccagagtttatgctgttattctcctcctcaaagccctgcaagggttcctagcatccacagaataaattcctgaccatggcattcaagaccctgttcagctgcccttcaatccctcttcccacaatgtccaaatcccagttgtccagcctctctgtcaatggctcctaccttgaactcaccaaattcaggcatccattcactcattcatcaaatgccaagcacctgcctctgcaggtaagaaccacatcccaccccttaggagctcagaagctcataaggaaggatacacacatactcggataacagtggggcaaggatgcaggagaggttccgacaaaacgctatgggagcctgtaatcccagcactttgggaggccaaggcaggtggatagtcttaggtcagtctggccgacatggtgaaacctggtctctaccaaaagtaaaaaatgggtctggtgtggtggcagccacctgtaatcccagctaacctgtaatcccagctacctgggaggctcaggcaggagaatcgtttgaacccagaaggcggaggttgcagtgaaccgagattgtgccactgcactccagcctgggtgacatgagggtgaatgagggcgaatgaagctccttctcaaaaaaaaaaaggtatgagagtttggagtaggatgctgtcaagggacaaagcacttatttttttcaagtggcggcaggtttccttaggaaataactgtttttggctcttttggggtatgggaaatgaagccctcctcccatcccaagaaatgaccaggttggggagggtaaaacagagaattgttctgcacaatattgcaggaagcatctggaaattctgagggcagctctgcaggggccggaggacgaggctctaggatgggaagaaaaggaaagagtggagaggaagaggatggggcctagaagcatggaggaaggccagggtcctggagaagaaagggcccagctgaagttctctgtgacaggaacgagcaagggactaagatcagagacatccagcacttgatgtttagttcattgctctgttttggggcattggcatctttcccaccccctacactttagtaaaattccgctacacagaaccactttgtgtgagtaaagctgtaggaaaatcaaggaagggagagttttctagtgctgccataacaaaggactacaaactgggtggcttgttaattcaacgtatcgtctcacagatctggagactggaagtctgagatcaaggtgtcagcagggtgggctccttctggggctgtgaaggactccattccagacctccctgcaggcttctggtggtccgtgggcatcttggccactccttggcctatagatgcatcactccagagtctgccttcatgttcatgcaggcttcttcctgtgtgcaagtctgtgcaatatcccctttttacaaaaacaccagtcatagtaaattagggccccttttaacctaattacttttgccatgaaactatctccgaataaagtcacattctgagatactagatgaggggttaagacttcagtatatctttttggagggttccatttcaacccacagcaggagatgtgttccaggactgagttcatgtggggtggacaaacagccgtaaaaggggagatgtgagggagatcaggagtgtataggaaattgagcaaggaaattgactatgtaaagcgtaatctacatgaagaaatcctccaacttattgggaatggagctactatatataggatggcggctttagccagttcatgtaaactaaaggaaagggtgattctataaggctggaaaaattggagacacacacacacacaaacatcacaggcagctcacatttggggcatgtgggttccaaagagatttagtttgactgtaaagttcagggaaggctttgtggaggaagaggcttcaggatgagcgttggaggatggggtgaatctggacatgctcccacacctctggttcacactcttctggaatacactgtgccttcagtgcagctttgatccagtctttctttcaatgtccaacttgagttagatgtccaattccatgtccagccactcgacaaacctcctaggaccagcccatccctttgacacatctcccagccacatcatccctgatggtctgactgaatatttgtttgttcctatccatacttgcactagagttatcccaacagtggttatattctgtctcgtcaactccttgcaaattctagagcacctcgtatcctagcataccacctagcacacaccagacactcaataaatgctcactaattgcttataagggaaatctattggctcagaaaatcttgacccacttctggatttctcactttctcaaagagaaactttggaaggagatcccatggaatcctactttagccaaggccataaatactctgaggggcaaataaacagcgtggatgccagagaatagacgtattgactccaaatgaaactgcaaagaggactttggagcttgaaagggaaacctaatttgagtttattttctagatgattaacattaaatagtgccaatccatcagctagcaccagaatttctagatcaggctgcagaaacccacagagcctgaagaaagagcatccaaagacttcccaggagcacaaggtaagacttctgtgaattcttccgcaagactctgacagagcctggatagcaccagcagagacgtggacctaggcggtccctcggaagtgtctcttgagaaccacaaggaatcaggggttcagacatagggtagtgccctccagcaagacaggcgtgcagccacccatccttggaggtgctgggaggctgggaagtaactgaagagtcacaacaggttctcaaattgagctcctgtctctgcatggacacagcaatcttaagatagaaggctggagactctgctaggcattttctggctgccttgctccctaagcccagctgtaggcacactgtgatcaggtctacttaggacctcaatctagaactggtggaatggcttctgatggaaccactcttttttttcttcttcttctttttgagacggagtctcgctctgtcacccaggctggagtgcagtggcgcgatctcggctcactgcaagttccacctcccggtttcaggccattctcctgcctcagcttccagagtagctgggactacaggcgcccgccaccacgcccggctaattttttgtattttttagtagagacagggtttcaccgtgttaaccaggatggtctcgatctcctgacctcgtgatctgcccgccttggcctcccaaagtgctgggattacaggcagaaccattctctttgttcctgacattttcctgacgggaggtagaatctcaggggtcccaggaacatccctcatagggcccaactgtttgtgccaattgtcaggtctacggctgtattgtttttcacacattaaagaaggagtcctctgaaaaaaaggaagagagaaatgattaattttttaatatcatgaagcagagtataacatttagcacagtattcattatgaaaattgaaggcaggcagactatcaattcttgtatttcaaatctcaacttcagcatttcctagctgtgtgactatggtcaaggcacttaacctctctgagcctcagagagtttgcccgagaaatggtcataacaataatatattgctgggggaactgccttatatctacagggttatgaggcatcaacatccaaggatgctgtagttgttattctaaaccactctcctgggaaatctgttattcttcaagaaagcaaggaatgtcaaggtctaatgcagaagtggctcacactgcctgcacagcctccattcatgcagctgaatgttccaccatccatatgtcactggtagaacatttcttctgggaaatgaaaacatagtgaaatgcaaatagcagtcagaaaaaaataaatttgagtctcagatctattcctgtgggttgcataattgtagacaagttattccactttcagagccttggtctccctactttgcaaagaggcgggtcggatcaaaatgagtgagaagacaggggtgaatgccttagccatcaggtgtcagaccagtgacagttgtttttcctatggaagagtagcatggaaaggggcctcagagaccagctagattttaaaataaggaaaaagctgggaattttctgaagctttatataaccaatattttgaactgttgggatccaaggaaaaagaagtgaaaccacaaaggagaagtgtagggcatttctgcatggaagtggttctcaaacttcagcagcatgagattcacctggagggtgtgttgaaacacagatggctgatccttgcccctggactttctagtagctctggggaggggaccaagaatttgactttccgacaagttcccggtgatactgatactgctagtccagagaccgtactttgagatcctctgctattaatactaaatctaatagtttggggtcaattaggaaaaatattcacaacaatggcccctctcttttttaagattggggtaacacttttattttattttattttattttattttattttattttattttattttattttatttttactctaagttctgggatacatgtgcagaacgtgcaggcttgttacataggtatacatgtgctatggtggtttgctgcatctatcaacccgtcatctaggttttaagccccacatgcattaggtatttgtcctaatgctctccctccccttgccccccaaccctccgacaggccccagtgtgtaatgttcccctccctgtgtccatgtgttctcattgtttaactcccacttatgtttggttttctgttcctgtgttagtttgctgagaatgatggtttccagcttcatccacgtccctgcaaaggacatgaactcattcttttttatggctgcatagtattccatggtgtatatgtgccacgttttctttatccagtctattgttgaggggcatttgggttggttccaagactttgctaaacaatggcccttctcttatgggtggtctctacctttcaacaaagaacaaatgttaactgttccctctgtgccaggttctatgctggcagttttctcaatcttcaaaacaccctttggagaaggtgccactattatgcaccttttatagataagaaactgacagcgtatgcaacttgctcaaggtcgtacaactaataaatgaaggaactgagaagtggacttagggctgtctgagctcttaaccctgatactgtcttgctttcgagtttactttatagacgattaatattaaataatgccaattcatcagctagcaccaaactcaaaatgtccattgacaatttggagtgtttctctcactcaggatgcagctgggacagggggatcaatttatacttgtgatttagtgaggacagaaagcctcctgagaacatacctctggggtcctgcacacgttattttgtgccataggatttggtgtcttgccagtaaggactgtataatctaagtaaagggataagcccaccagccacaacaattaacaagtaaagtacactagtaacattatctctcatctgaatgggatatcttcgcatctaataatatctttaatgttctgagggctacatgcctacctcctcccattgcacacttgctccccagcatcaaaaaattaagcaattctctaagtccagcttatcagtcctcatcaaatcgggacaatatcccaggtctccccccaagtgattcccttctcaactttttctaatgctcaagattcagtagaaactgcaggctattaagggtttgatcactgtcataatctctaggaccctggaccataatggtttaaacacaaggaaaatgcaacaaaatttctacatggtcgcaatcccaacaccaacatggacaagacccatgaagagattgaaagggatgatcattcccaggccacttggcccatggttcctcctggatgtcaagggcacccaagaagcctgggaaagacagtctgtttttttgctctgaaaccaattaatgttgaaaaatcatacacaaaatgccttaattaaattaaacccataaatgagttaactagttatagacttcaaggacagaagtacagctggggcaaatgagaacctagaaccgagagtcaaaaggacatcaaagaccaaggtagtatctgtgtgtatgtgtgtatgtatgtgtgtgtgtgtgtgtgtgtgtgtgtatctgtgtgtgtgtctgtgtgtctgtgtctatgtctgtgttatctgtcttcctccctccttccctctctctgtgtgtgtgtatgtgtgtgtgtgtgtctgtgtatctgtcttcctccctccttccctctctctgtgtgtgtgagtgtgtgtctgtctgtctgtgtctgtgtcttcctccctccttccctctttctctgcgtgtgtgtctgtctgtctgtgtctatgtgtcttctttctccttccctctcgctctctctttctctccttcccccttttcctttccctctctctctccttctctcctcttcttttatctctccctcccccaatgcttctcagctttattctcttcactctactaactggtgttctctgctccccctgcacacaacatacatgtgacccctccaactctgcctagcctcccatcccacagtagtccttgggtccagttccaaattcccaggagaaagaagttaccagagcatttggggtcagttgttcacccccagatcaatcagctttgccagggcagggggcaagatggggaggtagcctgtgcccactcaacaaactcaaggcatgcagattaaaatgccaactgcagggggctaagcaaagccaccatccagactgtgaacaaaaggtctacaagaagctaagtagcctcgggaaaccctagtcttgcaaatccaaatccgtaaaaggaaaacagtgtgttcttgccaagaaaggcaagaagtttattttgtctggtaccatgctaggtgattcttattttaatgaagatgaaactaaagataagaatgagataagatgcattattcattttgtcagaagagggaaatgcaccttcttatgtgttttgcagcagttgtacaccatgaccgaacaggtgattggagccaacagtgtacctggcattattgccccagataatgttcacgtcatccagcccagcaaccctgtggcctctggaaatcatctgcagccttcagaggtgaccacttacccaatctcaccaaaagtaatccactgtgatacaggaagagcaaacttacagaatctactcgtggtgaaccagaactcagcagcaggtgtacagagtcaacccattgggtatcagcgacagtatccagtgggaacagccagtttgcagacggtgcctggagtgatccaatacacacagggaaccacgaatctccagacatggcctggagaccttcagaatcctctgaatgctaaccctgggctgacacacacctcaaactcatcccagtggaacacgtcatttgcatcatttacttcatttaatcccaagaaattcataaatgaggaggtcagaacattaggggtgagtgtgatttctccttctctccgatttgggtcacttcataagccctcgtctagtgctctgggatgaggaagggaatgtgttgagagggtaaaggggaggtggagtgggtgtggggggcagtttctggaggctggacccagtacaatcacccagatgctggcccctctcccttgtcttccttccactccccaaggagacccatggtttgggggataaaggtttgaataatcagtgaacatccccaccttacccagctatctatcaggggcatgggtcagcaatagttccactaaaaagaccactgagcagggagtcaggcaatccaggtctcaggccagctagatttgctgagtggccttgcagacatctcttcctcgctctgggcctccatttcctcatctttagaataagaagattcagctttcttaaattccttccagctccaaggttttgtgatttccttttcaatcaagggggcctctgcctctttcctgcctcctccagtttcatttagcaccttccaaagctcaattcaattctgtttttgaggcagaagccagatgcctggctggatctggatgcctggccaactcttagtatggagactggcgtgtcacagatgcccatactctatgcactcatccattcaacactgcacgtgccctgcaaggagctggagactcagagataaccaaaacatcatccatgaagatgaaggagggtctttgttcatggcagctgtcataattacaataccttctggcaattgccatgagacatgcataagttattgtggctgcccaaagtgcaaattgtctggcttctttgagaagttacaaactgcctcctggaggcaggaagacaaggacaggtgcaggaaggggacccattcctccttatttaatcctgggtagacaagtagattgtgccaggaacaaggcgttgtttgcctcccaaacaaatcaaaatcaaatcctgaactaaattctataaaacagcaatcaggaatagaaatcctggtcaggccggacacggtggctcatgcctgtaatcccagcactttgggaggccaaggcaggcagattacaaggtcaggaaatcgagaccatcctggctaacatggtgaaaccctgtctctaccaaaaatacaaaaaattagccaggtgtggtggcgggtgcctgtagtcccagctactctggaggctgaggcaggagaatggcgtgaacccgggaggcagagcttgcagtgagccgagacagcgccactgcactccagcctgggctacagagctagactcagtctttaaaaaaaaagaaaaaaagagggaaatcctggtcacaagcatcaagtgagattataaatgtgtgcggaaatcctccaaaaggtaaagctggtctatgatattgcgtagtaattatcatcttgtattacaatgactatcattattattaattaatactgggtaaaggtttgttaactttggctagcaattattctaagatattttggaaggatttcaaaatttgtcaaaacagaattaagtcagagcaaatatctggggaacctggccaaacaaaatgaaaagccaaaaagccaaaactgcagactatctttaatcaattacaattttgtttggggaaggaaactatgagtgcctcttagcccttttcccgattgccccaagaatattcgccagcagcacttgcagctgcagtatttagcccgagataactttgccaatgtctcccttttattataactttcgccttgctctagcatattgaccttggaagcaagagacatcattctatttatagcattctgtttttagtagtagtattcccatttacaaaatacagtaattctcgattactaaaaatgtcaaatcctagaaaacgtagcatttctacgcatggtgttaacattgttctcaaacagttgttggccaaagattcatttgatgaatccagtgtttccgaagtaaacaattctaatgttagttctgtttagaaatcactcgaaaaaccgtttttatcatttattttcacaatgaaaatcagccagatttgcttcagcctcaagagtgtgtttatgtaaaattaaatgagtgctggcagcgagcggcactattttttttctaaatgggaacagggttcattaatatactgataaagtgggcctgtagacagagtcaagcatgtcgccttaggaagggatgttcatgtgaaacccaggtctgtcaccaactcatagactcatggaccaggaagacagaaagcagctgccctaggctagtcatttgatccctgaggaaactgaggcccagagaagccagtggtaaatgctgtaggagccccaaatgagaggggattcatcctggacgggggctcaggaaaagaatctctctggtccttaagggaaggataggatttcaggaggaggagagtaaagcaagcagatttcagacagtggcaacagtggaggaaaagcagggagtaaggggaaaaacacaggacttgcaggggacagaggatctccccttgtgtacgttgccaaggggaactgtggggacgtcatagaggaggccacaaagagaatatcggtactgggaagatgaatggagtcagcagagggcattgaaatacttactgcattcaggcctggcgtggtggctcacccctgtaatcccagcactttaagaggccgaggcgggcggttcacgaggtcaggagatcgagaccatcctggctaacatggtaaaccccatctctactaaaaatacaaaaaaaaattagcctggctgggtggcaggcacatgtattcccagctactcgggaggctgaggcaggagaatcacgtgaacctgggaggcacagcttgcagtgagccaagatcacgccattgcactccagcctgggcgacagggcaagactccgtctcaaaaaaaaaaaaaaaaaaaaaagaaacacctactgcatgctaggaactgggctacaagtttcataggcacttttaatctctaccacagccctgcaagctggatactgttacccccatcttgcaaatatgtagcctctcaaacatgctcttgaggctgaagcaaatctggctgattttcagagtgaaaataaaatataaagacctttctttgagttatttctaaacagaactaacatcgaatggtctgaatcatcagaatcatctattttggaaaaatcagattcatcacatgaatttcggccgacaactatctgagaacgatgttaacatcacgtgtaggaatgctacgttttctaggatttgacatttttggtttccctgcaaataaggaaaccctgaggcagagaggatatttgctggagaccacacagccggccagtgctgcagccaggacaggagccaggtggttttcagccacaacccgggctcggcccgtgtctctgcacacttgtgggctcagtctaaagggaacacatttcttgctctgttataggctgtcttacctttcctttatgcctgtgattctcagcctgagtgcaaattcgcatcacctgtgaagtttttaaaaaaacacccaggtgtggaccctaccctcagagatttgtatccatttggtctgggatgagcccccaacaccaatcacccctggggtgattctggggcacagccagggtgcaaagcacagctccacagcccacaggcccgcagttctgctctctcacagtgacttgttctccctgcaggccatccagatcctcatcggcctgacgcacattttctctgcaattaaccctgtgctgtattactatccttttgtgacctggttgtcagggtacccgctctggggaggattatccgtgagtacaaggccatatggtctccttcctgggtcaccagactgggacaagaaggaagtggaggaagaaggagcatggaatcccattcccagtaatatgactctgtagactagagccagcctccaacttgcagatacagcaaagggttatatcaactccctgccccagcaacactccctcccaccaccaccctccccatctcccataccccccacccagcctctagggaactattgggtacaaacactcattatcatgttctttacctcttccaccctctctgggttctcttttatgagatatttatctgataaggccaggcagggtggctcacgcaggtaatcccagcaatttgggaggccgaggtaggtgaatcacttggggtcaggagtttgagaccagcctgggcaacatggcaagacctccccccacccgccatctctacaaaaatacaaaaaattagctgggtgtggtggtgtgcacttgtagtcccagctacttgggatgctgaggtggaaggatcacctgagcccaggaggtggaggcttcagtgagccatgatcacaccactgcactccagcctgggtaacagagtgagagcctgtctcaaaggaaaaaaaaagaaatatctcatatgtaactcagagtacgtaaagttgtgtgctatagacagcatctacctaccataccagttatgggagccgactgcaaaatttccaggaattatgtaaaatgattgtcaaaccatttggtagcaggaagttggccatgttgggtatacatacgacatggaaatcaacacgtgctccaaatcagggcccttccctgcagtgctgccacctcataaggcagatgttaatcatttaccagcaggccattcagtatatttcatcttgcagagcttaaataatattaataaattgaacacccacatgtacaattccacttagatgaggtccctagggtggtcaaattcataaagatagaaaaagcagcatggtgattgccaggggctggggtaagagggtaatggggagttagtgttttatggggactgagtttcagtttgggatgataaaaggagatcttggggtggctggttgcacaacaatatgaattttcttttcttttcttttctttttttttttttttgagggggagtctcgctctgttgcccaggctggagtgcagtagtgccatctcagctcactgtaacctctgcctcctgggttcaagaaattctcctgtgtcggcctcccgagtagctgggattacaggcatgtgccaccatgcccggctaattttttgtatttttagtagagacggggttttgccatgttggccagcctggtctcgaactcctgacctcaggtgatctgccccccttggcttcctaaagcgctgggattacaggcatgagccatcccacccagcctaacaatatgaattttcttggtgctagtaaaccaaacacttgaaggggtttgaatggtatgttttaagttgtgtgtattttaccacgattaaaaatagtaaattaaattaaagttttaaaaaatgaacacctacgtgtccaccacctaacttaaaaaacaaagcatcacacgtggtttttaaatttttaaatccctataagtatcccctctatgccccgagaggtaaccactattttcaatttaatgtttttcttttttttttttttttgagacggagtctcgctctgtcgcccaggctggagtgcagtggcgccatctcggctcactgcaagctccgcctcccgggttcacgccattctcctgcctcagcctccagagtagctgggactacaggcgcctgccaccgtgcccggctaattttttttttttttttttttttggatttttagtagagacagggtttcaccgggggctcgatctcctgaccttgtgatccacccgcctcggcctcccaaagtgctgggattacaagcgtgagccacggggggtggccgatttaatggttttcattcccttgcttttttttttttttttttttttgaaaaggggtcactttgtcacccaagctgaaacacaggggcacaattttgggtcactttaacctctgcctcctaaggtcaagcgaatggcccgccccaaccccctgaataactgggattacaggggggccccacccctcccaactaatttttgttttttcaataaaaacaggggttcaccatgttaaccagggtgggctaaaactcctgggctcataatccacccacctcggcctcccaaagtgctgggat

SEQ ID NO: 81 - DNA, 19303 bp, homo sapiens
  genomic_DNA (1)..(19303): n is an undetermined nucleotide (dATP, dCTP, dGTP, or dTTP)
  coding_region (8830)..(9012)
  coding_region (9468)..(9587)
  coding_region (10759)..(10815)
  coding_region (12466)..(12597)
  coding_region (14049)..(14159)
  coding_region (16890)..(17009)
atttttctaaagtacaaagtcatcatgttactgttctgcctaaacttattcaggctctcctttgcccttgggctaaagtccaaatgctctagcaacacttacaaagccctggagatgtagcagttcacctctccagccccatccctcctcaccctccacttacacttgaccccgagccatcctgagtctccgtgagctccatctgcctggaaggctgctctctgcctgcttccaaccctcctatttgtcctgcttagctcccaaccccacttcagaccttcatttagataccacttcctccaggaagccttatctggcctcatcccccaaccccttctagattaggggaactcctccaggctctcgccacacccacatctcagtatcacatcactcacccgtccacagcacagttacctgtctccctgttcatcttattcaatggacttcatattctttccctattgctgctgtaacaaattaccatgaacttagtggcctaacataacacagacttattattagacagttctgaggtcagaggtcctaaaatccaggtgtcggcagggctgagttccttctggaggctccagggaggccccgcttccttgccttttccagcttctagaggccacctgccttgcttggcttgggaccttggcctccacctgccaagctcttccactcactctgaccctcttgcctcccgcttgggaatacattgggcccactgaataatctatccctatcaacaactttgacttaatcatctgcaaagcccttttcactgcataaggtaacgtattcacagattctagggatgtggacattgttgaggtgccattgctctgactaccacaaattctgagctcctcaaggccaggggcagcctcttgcccactcctggatccccagcatgtcacacagcgcctggcccaagtaagtgctcattagctgttttatcaatgaacggatcagttaatgaacaagggtatcaggggggtggggggctgtcttcctactcagcaaaaaagcactggtcctggaaaaacactcaccccatgtttgaggagctaaagtcgtgggtgatgaacgggtgcaaggcaaccaatgacagtgattattggcctcacgtgtctcagcattacagtgggcaggcaagtgccttcagaagaaacaggtctctctcaaagctactggctgctgctcagcctggccccctacccctcaggggaagcctgcatagtccagcaggtctgagaggggtgagtggccttttgcctgattgtgtgtgtgacatcgaagtctatgccacattgaacatgcatgacagctgagcacgagcgaccccggaagcacacagcaactaaaataattaggcacggccactgacacgtgtgaggcgctgcttttaagcattttacatattctaactcatttaaccctccagcaacttgatgggtactattatccccattttatagaggggaaaactgaggcccaccaaagtcaaataacttgcccaaggtcacacaacattaagaggtagaatcaagatttgaactcaggcatcccagatgcagagtcagctctgaagtgctatgctgtgctcagcaagtcaaagtcagtcagtcctggcatcagggactatctgtacagccgctggctctgcctcgcgcttccctgtccaccctcagcagagcgatgtggagagagaagccagatggaaaaggaagagcccaaggcgggatctaggggtcgctggatctgggggtcgctggatctgggggtcacaggatctgggggttgctggatctgggagttgtgggatctgagggttgttggatctgggggttgtgggatctgggggttgctggatctgggagttgtgggatctgggggttgctggatctgggagttgtgggatctggaggttgctggatctggggtttgttggatctgggggtcgtgggatctgggggttgctggatctgggggtcactggatcgggggggtcactggatctggggtcataggatctgggagtcacaggatctgggggtcacgggatctgggggttgtgggatctgggggtcatgggatctgggggtcacaggatctgagggttgtgggatctgggggtccctggatctgggggttgtggtacctgggggtcgctggatctggggtcactggatctgggggtcatgggatctgggggtcactggagcccactccacacctcctccaccagaacagcctcacggaagaccttcacacttcccagagcagcaccgtgctcatggaaagatcagggcacaagatgtggcaactgattctgtcagatgcaatttgtgggccatgcctggatcctggatcctgatttgaacaaatcaaaagtaacaagacatttgtgagataatcagaaactgaagctccgactagttatttgatacccggtaagtaccaaaaactagataagaacaggtttttctgactcctagggttaagcttgtcccccacaacaggggtccccaacccccaggccatggagctataccagtctgtggcctgttaggaaccaggcctcacagcagaaggtgaggggcaacaggcaagcatgacctaccacctgagtgccgcctcctgtcagatcagccgcagcaatagattctcaaagcagaacgggccctattatgaattgcacatgcaagggatctaagtggtaccctcatgagaatcgaatgcctgatgatctgaggtggactaatttcatcccagaaccatcccccatccccaccccggcccatggaaaaattgtcttccacgaaactggtccccagtgccagaacggttggggaccactgctctatgaaagtagtttcttttttcctttcctcttttttttttttttttttttttgagacagggtcacactgtgttgcccggactgaggtgcagtggtgtgatcacagctcactggactcaagtgatgctcccacctcagcctctcgagcagctggaaccatagacagggaccaagacacctggctcatttttgaatttttgaatttttgtagagatgaggtctcgctatgttgcccaggctggtctcaagctcttggctcaagtgatcctcccactttggtctcccaaagagctgggattgcaggcatgagccaccgcccggccctttaaaagactagtttccaaatgttcaacagagctctgtggggctgcagggttaaactctgagcgtaaatagacctcagtgagcaccaggactcggttttaatttttttgttctgatcatgtggtcacactttttttttaaagagtccatatcttttagagataaatactaaaatgcttacaaataaaatgggaagatatctgagttttgcttacttctgggggagaataagattggccaagagctgctgatggtggctgtagctcgcgaatgggcacaggggtgtcatggaaccattctctctacttttgtgagtgcttgaaattttccagaattaaaagaactctttcaaaaggttcaacttcttactccactcccaggatctaagacgattacaaccactttcactccatcagtcatgccctgaaaacagattaaattatcaacatttcccttgccaaaggaaatttacaactgtcaaggagagacataaagaagggcactaagattttcacctgccggggtttggcgggagggggaaggactttgacagcttccatgcaaccggggcatgaagcagggcgtgggtccaggagggagaagatccaaagtcgaatgttgtaaagatgtgctgatttcccagcgctgtctctggggagctccggcagcgcaagagggcaaagcacagctggaagctcagagctgcagtcccaggtcctggggtgagtggtccccccatggcaggaacagaggggagtgattttgtgtttccatgtggagttggggggttgctcaggtgtacagacctggtccccccttgaagccaggggaccggcctcttatacccctagccaatcagttgttggctgtagggttggagcggtgttacttaaactcccagaagggaggagatgtgagcctttagcaatgaacaattataccagctggagaatgggtggcccacccagcagaggggatctgggaagtagggggcaccgtcggcctctcccctgcggagccccatcctgctgccagttactgacccttattgctggaggagccccagacacttttcttgcagtctggaaatgcatacacacagagagaccagttcaagaaaacagagccccagggaggagaagggacttgtcgagggccacgagggggcaggactagaatccagattcttgactccctccttggacggaggcctctgtttcctgcaggccttccagctgctggtgggtgagctctctttacaccaggcacactgtctggaagcaccaggaggaggctggttcagtacagtcgtaggtggttttctaactggcattcactgaaacgctgatcctctaaggcaccccacccccaacaccagcctgcctgtcacatgttgtgacactcttgtcactcagcacctctcaattcctgcctttctgtccttgacatgcatgcacatgcatgcacacacatgcacacacacacacacgcacacacacacacacacacacaccctgagaagctctctctgtcctctagggctccactgcacagtctgatgagggtcatattattcatgccacgtttcctctgcctgctcagccacagacctcccatggacacatcttactcactcctgcctcggtccctgcagtgtccagtgcagaaactccacaaacaaatccacgaatgacagtgttggatctcagatcactagctcaatacactcagtgcctttcttccctcacgaccccctacccccaccccagggccccagagctctcacggccctctccccctgtaagcaggatggggatggaggcaataaactcaccactccagatgatagggacagggtgtatcatgtcttaaccaagaaccagacgaggacaaggtggagcctcgctctcacagccctctccccctgtaagcaggatgcagatggaggcaataaactcaccactccagatgatagggatggggtgtaccatgtcttaaccgagaaccagacgaggacaaggtggagcctcactggtgggattctagacacgcaacaggccagtggcaactgtggctgacatttattgctatacgccagtccctgtcagttgcaggcattgtttcagctactcctcaccacctaccccctagggacaggcagtggcactccccatgagaaggtgaggggagactcagatgctgagatgtaaaaaaccggcccaaggtcaaagctccggggagcagagccaggactttgcacggagcacccattctagctgacaacttccagcgctcagggccgtgcccactctgctgctttgctggggggttctggagggtcctgcccagctctgtccctgtcctccctccactcccagaactgaaggaacaacgagaatatgtgtgggacccaggcatcccgtggccctgtgcagagcgctgaggccctagtggcagtgggtttcccgtgggataccaagctggctgggtccgtggtcctgagctggctgagggggctggggttgggcggggaaaggctaaaaaagttcctttatgcaccaaacagcctgctgcctgccccctctctgtcagcacactgtcacctcctagcagccctgcacaggtcctggaagtgggccaggacagctgggaataagtgttctaaggaatcagagttcatgctctttgtcttggaaaggcgtacgagagagtcataacaaacttttccccatgatgactaaggtctgccctctgcaactccttcctctcctggttgtataaaattccttgtagcggctctctatcccgtgagagaagtattatatttaaagttggaagggaccttagagatcatcactcaattcccattcccactgtgatatgcacgtgagcaaaccaaaagcagagaaaaggccaaaaaccagagcccaggaccagaaattgaaaccttcaaggccactttgcccaaaagcagaccccacagaataccaattgcatagaaccgttagacaatgagaaaaaaaagatcctatggccagccgggcgcagtggctcacatctgtaatcctagcactttcggaggccaaggtaggcggatcacctgaggtcgggagtttgagaccagcctgaccaacatgaagaaaccccatctctactaaaaatacaaaattagcagggcgtggtggcaggtgcctgtaatcccagttactcaggaggctgaggcaggagaatcacttgaacccgggaggcggaggttgcggtgagccaagattacgccactacactccagcctgggtgacaagagcgaaactccgtctcaaaaatagaaataaataaataaataaataaataaataataaagattatatggccaattaagtttgggaaatgcccttaatactaaaacagagtgtgccacttgtagaaaatctcagagtctttaatatgagaaaaagggagaagaggctaaccatggtttctcaaacttatttgaccatggaacccttttactgcagatacatcaggaccaatgttccatggaacatactttgagaaaggttattctggattcttgagtccaactccctgttggatatttgaaccattcctactgccacagctctcacaagtgaatgtctaggtggaggtacagctccagtgcccaggcactcactatctccgtggacaagcagttccatccaaggcagctctactaagaagtccctcttcttctgttctttgcagtggagtccaggcctgggtccaggtattgtcctcccaggtgtgcagagtctaggtgaagccagtggctaacctggttcaggcctctgccaccgaatacatcccttagtccagctagctgtgtcagacggacttctgaaggcttgggaaccttcccaagggacagttcccagagggacagttcccatgcatagctgggcagagtcacaaaaagaatcatacagcactgtgtctatgagctcagcttctgaagcccaggaaagagggagaccctctgcccactcaccccactaaatcagcggtcgtcactgcaggaccatggagatatcaatcagggggtcctacccagcagcccaggcccagagcactggcgatggagtaagaccatgcgtggttccaattccaggcacttcctcactgtgtgaccatggccaaggcaggcaacctctctgaaccttggtttcctcttctatgcaatggtgctgacttcctgagtattaagggaggttgccaggcaaaactgcctcctggcacagtgcccggcatacagtgctcacccaactgtgaggccccatctggctctttggctcttgataatgtcccttcctttcccctctacccaatccaggatatagtcacctgggctatttgtccctccaaacttcccaaaactctttccctgcatccctgtggaaaatgtggatgctcaatggaacttcctggatccacaagtcagacttaaaagtgagaggaatggccctcccttttcattcatccaggatacagtctgagagcagcctctctctctcaaggatttgctcattagccccatccccatggagaaaccatctctgacctcaatccctgcaagccagctccctttcttccccgcccagctgtccacttcctgggacagaaagactacgttggattttctcaccaagtcccaggcagcccccaagccctagtgcatcccacggcgtcagtatacactataccaggccctgtctgcaggtcgtgtgtccagcccccttctaacttttttccccaactcctttttgtgcccatgagaacatccagaacattcatttccaattgttgagccaacagtgcatgaaggacttaagccccaggctctggagccagcctgccatgcttcaagtccaagtcacttactggttgtgtgaccatgggcaagtggcttaacctttctgagcctcatctgcaaaatgagagtgaggacggtatttacctcatagggttggaatgaggacaaaatcaggtaatgcacgtagaaggtttatctcagtgcctggagcagagaaagtatttgtaaatgttagcatcgttaaatatggacttcctgactcagtgttggctcataaaaagtcctcggtggaagatattttcttcccttctctccaggaggcatgggcaccaccacaggaggtaggacaattatttcccacctgccttcagtcactcttcttggaccagtggatggagactgtttacaaagcccctccattgacctgcacctctcgcacctcccaactcttccaaactgcagtctggccactttgggtgagctctgtcttccactggttgtgaagtttgcctggtcctcatttttctgccccaaaaggagctgtgtctttgcaaccccagaaaggctgtgagcagcaattactcccatctccaggggccagattattccaggtcaaatcaagaccaagaccaggggctgccagacagggcaaccacagttctggaaagatctggtcccttaaacagaggtgattggcagaggctcacccaggcacaagcctcagaaatgagacgggttctgacggccttcctccccgtcctgcagccagggcccccatccagcatcaatgaaagcagaagccacagttattcccagccgttgtgctagggggctcccatcatggcaagtcctcagcccagtccagccctggcagacaagtgcaccccagaacacgacccagcccaagctcctggctccacaccagcacgagaagtcccagaagaagagcagccttcttaaggagctgggggtgagcatccacttcccagggtcccagcagtgggaggcagaggagagggggatatgaggaggatgctggggggccccaagggaagaaagggaaaagagaaaggctccagctttcctgctgaacattcatctgaactggaaaaggccttgaagattggagagaatctgcccacacctactactgccttgtgaggtttggacagggccctgtcctggggagaatggcagaaggctgccagctccaggatagatagctcccacccatggggcccttggcagcttcagctctttctgcaggaaatcctggggagtggtccttcttagagagcctggtctctgggatccctaagaggacagaagggactcaccacagccagtaggtccagggcactagtggcctcaattagagccagtgaccgatgccctcaccccagccattctctcttccccacccaggccttccacatcaccatcgctctgctgcacctggtctttgggggctacctggcctctatagtcaagaaccttcacctggtggtgctgaagtcttggtatccattctggggggctgcctctgtgagtagaaggcaaaacacagaccgggtgtgggagtctgcaaggcaggcctgggaggccctggcatttgggacaggatgcagggtgggatagagagagctaataggagtgcggcagaagcgaggccctttctccagtgttcctagctctgcttcttttatcttagtcacaatggaaatagctccttccagggagcccctgtcaattctgagtcccaagagagcacttggaggctatccattctcccataattgaatatgtgcatttggcaaagaggagggtgagtaagacccagggacagcttcattcttccccagccttctgagcagccaggctgcctctggatccagctacaggtgccctgttggggttgagctacaaaaacacacagggtgtaaggtgtggctcctgtcctcccaaggccatcagccaggatgggagatgacactggaccagtgcatgcaccatttcccagaagctctacattccttcaggtctccagggagcccaccccattcctgactcccaggtggagtcctgcctatgcactaagtccaagctccacggcactgtcttgggcaagtatcccaatccccctttcacatcagtccactgttctcactgcccacaggatggggctttcactgcacagtgatagaactttccacacatgcagtgcttattcaccctgtgctcccagggactagcccatagtaggtgctcagtgcacattggaaagaatgattgcagaggtgctcccagagaccttggaagcaagaactcatatcctcccaactgcaagattcaagaaaagagaaacagtcggggtggaggggatagtgccactgatcccagcgatggtttgggtttgtaaaatgagggaagcaggagggtctaggagggagttctaagtgcagggcacagcttggtccaaggtgtagagatgggaggaggtatggaggtttgtgcacatgggaagatgtgaggtggggcagcttcttggatgggccacatggcaggcaagaggagctcactttgctggaggaatagtattccctgccccactggccgccaagggttgattttcttggagaataggggtgggggtgggaatttgtgggttttgaggaaccccagcttctctcctttgactttcaaatctgtcctgcagtttctcatttcagggatcttggcgataacaatgaagaccttttctaaaacttacctggtgagtgggcacactgagatcattctcttccatctgagcatggcataactttgttaagggcatctgtctgtaggggtgattgtgagggcacttctccaggacttgctaagagcaggctcttgccttcaggacagcagaggatgtccaagcagaagggtccagatgcagacaggctgacagacttggctgtgggaggaaaggaagcaccatctgaagcttctctctttccagtgcagtgaggcagagaaggaaatggctcccaggcaccctgacccatccatctaggacacaactttgcttcctctcaaatctactgtgtcttaatcttaatcaccacatagcctgcaagccccagcctccagctggatttgcatctacttctcctctctaagagccaggcagatggaacggtggtcctcccttttctgcccgtgctggccactgcccaaacaccttgccctctcccctgcacacatggctcccatctttgacttactcctgaccactcaagacaacctgtatgtcttgtcctcccggagatcttccctgacctccatggctgccttccattctcccacaactctgtggacttacctgtctctactgtacactaaattatttctgggcagaatgtgcccgagcatagtgatagcccaaggtggcccaagtaggcacagagtagacacctagcacaagactggatgggtggaggtggatggatgatggaaggaacatccctgcaaatcacagctcacacccaggtcttcccacctcccctccttctgcccccgaagcccaagccaggtccttccctatttgtgtccctcagcctggctaggctgtggttgctccctactttctcagagggcatacagaatagaaggatggttgtgcagtttacccagcagaggcaggagatgcttgacaaagacgtgcccattccccagacctcaccctcctgggctgagccccttttagaaccacaggcctcttgctttgtatacctgagcataaggacactcttactgtaaagaaacccattccagtataaaaggctacagattccatatgtgcatagtctttcctcactaggaggatttgcacttggcaagaggctcttggaatgatgcttaacccgagaggacgatgaatacaggcatttcaggaaccatggcaggtgggcggagaaaatgggctggtactgggacatgtgaggatagggcactttcagagctcctcctgacctttctggtggggaaggggctggatgaggggtcacctgggtgtcgaatccctgacacttggcatagctgatgtaggatggtcggggctggctttgagcaggaaatggcaatagggcatcctttattgcaaagctcttggatctgaaggcagctcttgggttctcccaatttgtcccatagaaggcaagggccagctggaccctcctcagtggtcacacaggagcagctcagctcaatcctgtgtgaggggctgaggggccagtgacaggcagagggggccttgggcccagtgacaggcagagtctctcctgaggctacagaggaagctactggcaagcatgaggggaggacctagccccaggtctccaccctttggacagctgttacctttatttttcacctatagaagatgttgtgcctgatgacaaacctcatcagcctcttttgcgtgctgtctggcctcttcgtcatctccaaggatctctttctggagagcccatttgagtccccgatctggagaatgtaccccaactccacggtgagtacccaggcctggagggccctctgacttcagcgaaggtgctgccttggatttggccaacaggaggtttccagctcacagaaagcccctcctggagcccaggtgtgggctgctgggccctttgccaacctgtttctgtcccctacaaggtgtggtggaaaggtgggtgctgggctgctgactggtcagcatcactgaatccaagtccacttttatagattgggaaatggggccagagacggggaggagcctgcctgaggtcaagcagcaacttgacggcaaatccaggaccacagcctaaaactgctgatttcccagccagggctctaagcatggtgtgcctggtggcccctgtgatccgggagcctcccatcagccttgcaaagctggccaagtccactttgttaccctcatcttctgggagtgaacacggaggtccagagaggctagattagtgggtctttgactccaagcctggtgctcttttcaccatatcactgctgcctctgaagcagaaggcagaccactgggtgcctctgggccaggctccaagaattcttttttctttttttttggaaggggcgggggaacggagtctcactcttgtcacccaggctggagtgcagtggcacaatcgaggctcactgtaacctccgcctcccagattcaagcaattctcctgcctcagcctctcgagtagctaggattacaggcacccaccacagccaccaccacgccaggctaatttttgtatttttagtagagatggggtttcaccatgtcggccaggcaggtctcgaactcctgacctctagtgatcctcccgcctcagcctcccaaagtgctgggattacaggcgtgagccaccatgcccacaagggttctgaccatagtggtttgttattccttatctcctcccagcacatacacacacgtgcatacacatgcacatcacatgcatgtgcgagcatgcatggacacacatgtgcgtgcacacacacacatatacatatgcttccccatcaaatgcatgtgatactatgagatgactcccagctgcacggctcttcccctcctctgctgtaaaacatgctccctcactctgggactaggtacccccatctgtcaaataggcttggatcagatgaccctaaggctaccttcattcttaccagggacccatgagattctccagccctcaaacgttaggccaatactcaccaaagacccatatgtgccaggcattgagtgtagggcagtgaccaagacagaccaagtccccgtcccacagagacccaccctgccttccccacgcacacctgggagctgaaaccccacctgccctctgctgtggatcttagcaaggacccctgcctggctaagcccacgtgatgcgtgcagacacccagcgaggcctcaccctgccttccttccctctaccctctcaggtccacatccagaggctggagctggccttgctctgcttcactgtcctagagctcttcctgccagtgcccacagctgtcacagcctggagaggggactgcccatctgcaaaggtaagacaagggcttgtcttcccaggaagacaaaaaatgggggcatgaggcagcagagagctcagaaaggaaagatatgtgggggttacaagaggagcgtgtttcattcattcctcacgttgctgagcgttcactaagtgacagcccacgatccagtaggggagccaaggcacgggggcaagagaggaggccaatccaaggagaaaagggtgaggctgccagagaggaaactccatgggtgcccagaacaagaggctactgtgctgccagctctgaaggccctggggaaattgcatcacagaggcccatgatgaccgggcaggattcggacccacaggcataggtggaagagagactttcagcagagcaagaagagcacgagcactggcttggagacaggacagagaaggcctggggaagctatggtgtgtgtggagtttggctgtagtggaaacaagtgacagagtcatcaaagattgggcatttaaggaattgcagggactctattaagcatcaatcgatgcatccattgatggatggatggatggatgatgtatggatggatatagacgtgcagatatacagataaatatagctgtatttaactttatcttctcaataaccctttttcttttgagactgagtctcactctgtcacccaggctggagtacagtggcacgatctcggcccactgcaacctccgcctcccgggttcaagcaattctcctacctcagcctcccaagtagctgggactacaggcatgtgccaccatacctggctaatttttgtatttttttaagtatagatgaggttttgccatcctggccaggctggtctcaaactcctgacctcaagtgatccaccacccatggcctcccaaagtgctgggattacaggcatcagccatcatgcccagccctcaacaaccctttgaggtacttacattctcatactacagactagcaagctgaggtccagagaggtcacatcacttctcaaggcgaagcagccaattaggaaatccaggactcagcctgagctatgtccaacccacagtcttgcccttgtctacccatggggatggcatagggctagatatattttaaaatagaaggcaagtctctgctcaccccaaagatcctgaacagttcaggataaggatgttttataaaagaaaaaaaataaataaaaaataaagaccctgaccagaagtgatctctaaggctcatttctttaaagaaaaaaaaatcatattacaatctcaactttagaacattatttaaaaaagtgccaaatcccccataattcttcaagtttgacactgattttcatgttagtgacctcatcacacaccaagtgttcacataatgcatatataagttgatggcctctgagtttcatttaacatcaagcagagaaggtgtctttgttaattcctagctgcctgacaggaagtcttctcattaagacatcagaaagccagatgggggtcttgagtcactgaggccaaccccacttttaaggatggggaaaactggggccccatacctagctgcagctatgagcaataattgttcctatttattgacctttgctgtgttccaggcactgtgctagtgctgcaggtggctgtattcattttctattgatgttgtagtaaattatcacaaatttggtggcttaaaatgacacctgtattaccctacagctctggaggtcagcggtttgaaatgagtctcaagggctcaaatcaaggtgtgtcgccaggactgcatcccttccgggggcatcaaaaagaatctctttccttgccttttccagcttctagaggctgcctgcattccttggcttgtggctccttcttccaccttcaaagccagcatcacaacatcctccaataaccctgtctccctcttctacctttaaggacccttatcatcatactgggcccagagagataatccaggagaatctcccaatctcaaagctgattggaaaccttaattccatctgcaaccttaattcctctctgccgtgtgaccagagattagaacatgggtgtcttctgggggccgtgcttctccctactgcactagctaagatgtccttgaatctcacggccattctgggacgcaggttctgcttttccattttaaagaggaaaaaatgaaccttagaagagttacgtgacttcccatggtctcacagccagtaagtggccatgccaggttccccaatgggccctgtgccctccccatcggtaaggatggtgccagggacaggctctccagcactgagttggtgccaccctcatcactaatcagggatggaggtgtggcagcaatcattggcagacactgttggcattagacctgcccctagagtgtatcctggctagaagggacttgggtcatggcccagcccccctcaggaaacccaacagggtgagtgacttgcacctggtcaccaggacactggtagcgggacgggaaccagagccccatccagtgactcccatgtgggcctccccctactcccttttcaagaacagggagggtggagggagtcacacactggtctatggaagtcgcttcgtctctcaagcctcagtttccccacattcatggagaacttgagtcttcagaagtgaactagcagagaagtgtttcggaagcagccagtcgctccacagctgtgagcagcaggggcggcgacttttctttcgcagaatgatgatgcatgccttgttccgaatacaccattgcatctcaaaggcctgccggtggagcccccgccatcctaccagagtgtgattcaaggcgacgcacaacacaagcaacatcagaggtgaagaggtttggccctggctccccagaccttcagaacccacgcttggccccttctccctggcatagatagaaaccagttcccaggggagctgtaaggggcaaggggctaacagtgctgcagctagaactgcctggcctgggagtggtagccaaggcagcaatggtcctatcccctcaggcactagaggaactcccagggccccccaggaacatctcagcacctgacttggttgaccagaactacctcagctgaacctgggcgcaaccaggacccatcgccttccctgccagcctccagagcaaacccctgggcctgcagccccctggtgccccccatgccctctggcctcccttgcctgccttctctgatcaatggtggatgcacagggggatataagggcagccaggaaggaaggtctccagagcggcacaggcaggggcttcccttgcctcaacctactaagacatctctgagggagcctgtgtgtctgaatccctggatttgggctgagggcagctggggagttgagtcccatagaaactgtgtacagttcttccctctgaactagaccctctgcatgaatctttttgccctcctggacctcagtgtctccatctgtaaagtggaggtgcaaggatgacatgatccaggagtctcccagcttgaaagctctgagatcaggagaattcaaggttcacagttgtgacatcgaggttgccagtaaaacttcagcctcggaatttcaaacctacttgtgctaagtaaataatgtgagggagagggacctgccttcctcattttcctaatttcagtcatctgaggaatagtcttcaggacttttgcttatttgtgagctgcaatgtattctggttttttttccacactgattcttttttctatattattttaaaggggcactttgtagcagcaagatataggaaatcagtatctttccataaacagaagcaaaccccaaaaataacaaacatgtgaaataaaacgcaattttcccctccaaccccgtggtctcacccactgcttcccttcctcttgctagctctgccccagccaccatggcttccttgaggttccacagacaccccagggacacccctgcctctgagccatcacccttgcccttcctccacctggattctcttcccccaggtatttgcagagctcactctttgaatctttactgggccactgactctgagccaagtaaatgctatttaatctcaatgtcatttaatcctcccatcgatctgtgacctagctgctgttgctattaatatctccatttcatgcaggctcagagaagttaagcaagttgccccggacacatggatagtcactgacggagctgcgatctggacccagactgcaaactgaagagccactgcctgacaatgcccaaacttggttggagcatagcccctgctctcccaaagttgcactttcactgggaagatgagatttgcacatacaaaaggctagagcgatggtctatacagcaaagtcagccctcacagctcctgggaacgctgtcctctcagataagccatttcttacatagttgatggctcgatatctgtggtggcccagattgttttgttttgtttcgctttgttttgttttcttttgttttgttgagatggagtctcgctctgttgcccagcccagagtacagtggcactatctcagctcactgcaatctccgcctccctggttcaagtgattctcctatctcagcctcccaagtagctgggactataggcacacgccaccacgcccagctaatttttatatttttagtagagacaggattgcaccatattggtcagcctggtctcaaactcctgacctcaggtgatccacctgcctcagcctcccaaagtgctgggattacaggcgtgagccactgtgcccagcccaggttttgaagttgtccgagatagcagtctgctctctactgccttataaaatccctgtgtgaagggatgctctcagtatcatttgcccttgcacagaatatccctggggtttgaggttctttgaattctccctctttgtcatctctttcgctgccacttctggctgtggtcactagcttggccatagcacctctcttctccacttctgatctgctgcttctaaccttctatagattgcagctggctttaaaatagattgtaaagtgtaaggcattaggttctgagacagcggcagagagagccatgcaaatgtttaggacaacccagtctttcttttttttttttttttttttttttt

What is claimed is:

1. An isolated MS4A polypeptide, or functional portion thereof, comprising:
(a) a polypeptide encoded by the nucleotide sequence of any one of the odd-numbered SEQ ID NOs:1-37;
(b) a polypeptide encoded by a nucleic acid molecule that is substantially identical to any one of the odd-numbered SEQ ID NOs:1-37;
(c) a polypeptide having the amino acid sequence of any one of the even-numbered SEQ ID NOs:2-38;
(d) a polypeptide that is a biological equivalent of the polypeptide of any one the even-numbered SEQ ID NOs:2-38; or
(e) a polypeptide which is immunologically cross-reactive with an antibody that shows specific binding with a polypeptide of any one of the even-numbered SEQ ID NOs:2-38.

2. An isolated nucleic acid molecule encoding a MS4A polypeptide, comprising:
(a) the nucleotide sequence of any one of the odd-numbered SEQ ID NOs:1-37; or
(b) a nucleic acid molecule substantially identical to any one of the odd-numbered SEQ ID NOs:1-37.

3. The isolated nucleic acid molecule of claim 2, comprising a 20 nucleotide sequence that is identical to a contiguous 20 nucleotide sequence of any one of the odd-numbered SEQ ID NOs:1-37.

4. A chimeric gene, comprising the nucleic acid molecule of claim 2 operably linked to a heterologous promoter.

5. A vector comprising the chimeric gene of claim 4.

6. A host cell comprising the chimeric gene of claim 4.

7. The host cell of claim 6, wherein the cell is selected from the group consisting of a bacterial cell, a hamster cell, a mouse cell, and a human cell.

8. A method of detecting a nucleic acid molecule that encodes a MS4A polypeptide, the method comprising:
(a) procuring a biological sample comprising nucleic acid material;
(b) hybridizing the nucleic acid molecule of claim 2 under stringent hybridization conditions to the biological sample of (a), thereby forming a duplex structure between the nucleic acid of claim 2 and a nucleic acid within the biological sample; and
(c) detecting the duplex structure of (b), whereby a MS4A nucleic acid molecule is detected.

9. An antibody that specifically recognizes a MS4A polypeptide of claim 1.

10. A method for producing an antibody that specifically recognizes a MS4A polypeptide, the method comprising:
(a) recombinantly or synthetically producing a MS4A polypeptide, or portion thereof;
(b) formulating the polypeptide of (a) whereby it is an effective immunogen;
(c) administering to an animal the formulation of (b) to generate an immune response in the animal comprising production of antibodies, wherein antibodies are present in the blood serum of the animal; and
(d) collecting the blood serum from the animal of (c), the blood serum comprising antibodies that specifically recognize a MS4A polypeptide.

11. A method for detecting a level of MS4A polypeptide, the method comprising
(a) obtaining a biological sample comprising peptidic material; and
(b) detecting a MS4A polypeptide in the biological sample of (a) by immunochemical reaction with the antibody of claim 9, whereby an amount of MS4A polypeptide in a sample is determined.

12. A method for identifying a substance that modulates MS4A function, the method comprising:
(a) isolating a MS4A polypeptide of claim 1;
(b) exposing the isolated MS4A polypeptide to a plurality of substances;
(c) assaying binding of a substance to the isolated MS4A polypeptide; and
(d) selecting a substance that demonstrates specific binding to the isolated MS4A polypeptide.

13. A method for modulating MS4A function in a subject, the method comprising:
(a) preparing a pharmaceutical composition, comprising a substance identified according to the method of claim 10 or 12, and a carrier; and
(b) administering an effective dose of the pharmaceutical composition to a subject, whereby MS4A activity is altered in the subject.

14. The method of claim 13, wherein the substance is an antibody, a protein, a peptide, or a chemical compound.

15. The method of claim 13, wherein MS4A activity is regulation of the abundance of target cell subpopulations.

16. The method of claim 13, wherein MS4A activity is regulation of [Ca²⁺]ᵢ levels.

17. A method for identifying a candidate compound as a modulator of MS4A gene expression, the method comprising:
(a) exposing a cell sample with a candidate compound to be tested, the cell sample containing at least one cell containing a DNA construct comprising a modulatable transcriptional regulatory sequence of a MS4A-encoding nucleic acid and a reporter gene which is capable of producing a detectable signal;
(b) evaluating an amount of signal produced in relation to a control sample; and
(c) identifying a candidate compound as a modulator of MS4A gene expression based on the amount of signal produced in relation to a control sample.

18. The method of claim 17, wherein the modulatable transcriptional regulatory sequence of a MS4A-encoding nucleic acid comprises a sequence that is immediately upstream of the initial coding region of a MS4A gene as set forth in any one of SEQ ID NOs:73-81.

19. A method for modulating MS4A function in a subject, the method comprising:
(a) preparing a gene therapy vector having a nucleotide sequence encoding a MS4A polypeptide or a nucleotide sequence encoding a nucleic acid molecule, peptide, or protein that interacts with a MS4A nucleic acid or polypeptide; and
(b) administering the gene therapy vector to a subject, whereby the function of MS4A in the subject is modulated.
